(19) United States
(12) Patent Application Publication
(10) Pub. No.: US 2007/0039069 A1
(43) Pub. Date: Feb. 15, 2007

(54) Nucleic acid molecules associated with oil in plants

(76) Inventors: James A. Rogers, Ivoryton, CT (US); Monica Ravanello, Vacaville, CA (US); Thomas Savage, Sacramento, CA (US); Cathy Laurie, Santa Clara, CA (US); John LeDeaux, Creve Coeur, MO (US)

Correspondence Address: MONSANTO COMPANY, 800 N. LINDBERGH BLVD., ATTENTION: G.P. WUELLNER, IP PARALEGAL, (E2NA), ST. LOUIS, MO, 63167, US

(21) Appl. No.: 10/812,829

(22) Filed: Mar. 29, 2004

Related U.S. Application Data
(63) Continuation-in-part of application No. 10/806,075, filed on Mar. 22, 2004, now abandoned.

(51) Int. Cl. A01H 1/00; C12N 15/82; A01H 5/00

(52) U.S. Cl. 800/281; 800/320.1

(57) ABSTRACT

Polynucleotides that encode proteins associated with oil content in plants are useful in constructs to make transgenic plants, e.g., maize or soybean, with desirable oil content phenotype and progeny of any generation derived from the fertile transgenic plants. Markers associated with oil content QTL are useful in breeding for plants with desired oil content.

### REFERENCE TO RELATED APPLICATIONS

[0001] This application is a continuation in part of Ser. No. 10/806,075 which claims priority to Ser. No. 10/613,520 is also a continuation in part of Ser. No. 10/389,566 which claims priority to U.S. Provisional Applications 60/365,301 filed Mar. 15, 2002, 60/391,786 filed Jun. 25, 2002 and 60/392,018 filed Jun. 26, 2002, each of which is incorporated herein by reference in its entirety.

### INCORPORATION OF SEQUENCE LISTING

[0002] Two copies of the sequence listing (Seq. Listing Copy 1 and Seq. Listing Copy 2) and a computer-readable form of the sequence listing, all on CD-ROMs, each containing the file named “pa_{—}00678.rpt”, which is 7,821 kilobytes (measured in MS-Windows) and was created on Mar. 18, 2004, are herein incorporated by reference.

### INCORPORATION OF TABLES

[0003] Two copies of Tables 1-5 (Tables 1-5, Copy 1 and Tables 1-5, Copy 2) all on CD-ROMs, each containing the file named “pa_{—}00678.txt”, which is 192 kilobytes (measured in MS-Windows) and was created on Mar. 29, 2004, are herein incorporated by reference.

TABLES FILED ON CD
The patent application contains tables filed on compact disc. These tables have been included at the end of the specification

### FIELD OF THE INVENTION

[0004] Disclosed herein are inventions in the field of plant molecular biology, plant genetics and plant breeding. More specifically disclosed are nucleic acid and amino acid molecules associated with oil in plants, particularly oil in maize. Also disclosed are genetic markers for such nucleic acid molecules and genes and QTLs associated with oil in maize. Such markers are useful for discovery and isolation of genes useful in enhancing the level of oil in plants and for molecular breeding of maize with enhanced levels of oil. Also disclosed are transgenic plants with over expression of one or more genes associated with oil.

### BACKGROUND OF THE INVENTION

[0005] Maize, Zea mays L., is one of the major crops grown worldwide as a primary source for animal feed, human food and industrial purposes. Maize plants with improved agronomic traits, such as yield or pest resistance, improved quality traits such as oil, protein or starch quality or quantity, or improved processing characteristics, such as extractability of desirable compounds, are desirable for both the farmer and consumer of maize and maize derived products. The ability to breed or develop transgenic plants with improved traits depends in part on identification of genes associated with a trait. The unique maize sequences disclosed herein may be useful as mapping tools to assist in plant breeding and in designing transgenic plants. Homologous sequences in plant species other than maize and in fungi, algae and bacteria may be useful to confer novel phenotypes in transgenic maize and other oil-producing plants.

[0006] Increases in the oil content of maize seeds can be achieved by altering the expression of one or more genes that encode a protein that functionally increases oil production or storage. Effective changes in expression may include constitutive increases, constitutive decreases or alterations in the tissue-specific pattern of expression. See, for instance, U.S. Pat. No. 6,268,550, which discloses that a higher oil content soybean is associated with a twofold increase in acetyl CoA carboxylase (ACCase) activity during early to mid stages of development when compared with a low oil content soybean. In view of a correlation of increased expression of the ACCase gene with an increase in the oil content of the seed, it is predicted that over expression of the ACCase enzyme is likely to lead to an increase in the oil content of the plants and seeds. Since metabolic pathways affecting oil production and storage are complex and controlled by a large number of enzymes and transcription factors, there is a need to discover and modulate the expression of other genes associated with oil.

[0007] Polymorphisms are useful as genetic markers for genotyping applications in the agriculture field, e.g., in plant genetic studies and commercial breeding. See for instance U.S. Pat. Nos. 5,385,835; 5,492,547 and 5,981,832, the disclosures of all of which are incorporated herein by reference. The highly conserved nature of DNA combined with the rare occurrences of stable polymorphisms provide genetic markers that are both predictable and discerning of different genotypes. Among the classes of existing genetic markers are a variety of polymorphisms indicating genetic variation including restriction-fragment-length polymorphisms (RFLPs), amplified fragment-length polymorphisms (AFLPs), simple sequence repeats (SSRs), single nucleotide polymorphisms (SNPs), and insertion/deletion polymorphisms (Indels). Because the number of genetic markers for a plant species is limited, the discovery of additional genetic markers associated with a trait will facilitate genotyping applications including marker-trait association studies, gene mapping, gene discovery, marker-assisted selection, and marker-assisted breeding. Evolving technologies make certain genetic markers more amenable for rapid, large scale use. For instance, technologies for SNP detection indicate that SNPs may be preferred genetic markers.

### SUMMARY OF THE INVENTION

[0008] This invention provides genes that have been identified as being associated with high oil in maize. An aspect of this invention provides homologs of such genes from a variety of other plant species and other organisms, e.g. fungi, algae and bacteria. Nucleic acid molecules derived from such genes and homologous genes which encode proteins that are effective in the production and/or storage of oil in plant seeds are useful in other aspects of this invention, e.g. DNA constructs for producing transgenic plants and seed with higher or lower oil. Thus, a particular aspect of this invention is transgenic plant seed having in its genome a recombinant DNA construct comprising at least one oil-associated gene of this invention operably linked to a promoter which is functional in the plant to transcribe the oil-associated gene. In one preferred aspects of this invention such transgenic plant seeds can grow into plants having enhanced seed oil as compared to wild type. Conversely, an alternative aspect of this invention employs gene suppression technology, e.g. RNAi gene suppression, to provide transgenic plant seeds having a recombinant DNA construct which includes DNA effective for suppression of an oil-associated gene. Such seed can be grown into plants having reduced seed oil as compared to wild type. Alternatively, the suppression of the oil-associated gene could lead to plants with increased seed oil compared to wild type, depending on the action of the gene.

[0009] Another aspect of this invention provides hybrid maize seed that is produced by crossing two parental maize lines where at least one of the parental maize lines is a transgenic maize line which has in its genome a recombinant DNA construct for producing transgenic maize with enhanced seed oil as compared to its parents, e.g. its non-transgenic ancestors. Such hybrid maize seed will have a recombinant DNA construct comprising at least one oil-associated gene of this invention operably linked to a promoter which is functional in maize to transcribe the oil-associated gene. Still another aspect of this invention provides hybrid maize seed that can produce maize plants characterized by agronomic traits of seed oil level, yield and standability. Preferably, seed oil level is greater than seed oil level in said closest non-transgenic parental lines and, even more preferably, there is essentially no reduction in yield and standability traits in said maize plants as compared to yield and standability traits for said closest non-transgenic parental lines.

[0010] Still another aspect of this invention provides methods of producing hybrid maize plants having enhanced levels of seed oil production and/or seed oil storage as compared to the closest non-transgenic ancestor maize lines. Such methods comprise producing a transgenic maize plant having in its genome a recombinant DNA construct comprising at least one oil-associated gene of this invention operably linked to a promoter which is functional in maize to transcribe the oil-associated gene. Such methods further comprise crossing transgenic progeny of transgenic maize plants with at least one other maize plant to produce hybrid maize plants having enhanced levels of seed oil production.

[0011] Yet another aspect of this invention relates to a method for producing vegetable oil by growing and harvesting oil from plants of this invention.

[0012] This invention also provides maize oil markers that have been identified as statistically significant in associating with high oil in maize. Such markers are especially useful in methods of this invention relating to breeding maize for high oil. More particularly, this invention provides a method of breeding maize comprising selecting from a breeding population of maize plants a selected maize plant with higher oil than other maize plants in the breeding population based on allelic polymorphisms associated by linkage disequilibrium to a higher seed oil-related trait, where the selected maize plant has 1 or more higher oil alleles linked to a maize oil marker of this invention. The maize oil markers are also useful in a method of breeding maize comprising selecting a maize line having a haplotype characterized by the maize oil markers. The maize oil markers are also useful in methods of this invention for identifying other polymorphic maize DNA loci, which are useful for genotyping between at least two varieties of maize. More particularly such a method comprises identifying a locus comprising at least 20 consecutive nucleotides which are linked to a maize oil marker locus of this invention. Thus, a further aspect of this invention provides methods of breeding maize comprising selecting a maize line having a polymorphism associated by linkage disequilibrium to a seed oil-related trait locus where such polymorphism is linked to a maize oil marker of this invention.

[0013] Aspects of this invention related to maize oil markers are isolated nucleic acid molecules that are useful for detecting a polymorphism associated with oil in maize, e.g. molecules that are known in the art as PCR primers and hybridization probes for using the markers in genotyping.

### DETAILED DESCRIPTION OF PREFERRED EMBODIMENTS

In the sequence listing:

[0014] SEQ ID NOs 1-73 are DNA sequences of amplicons for oil-assoicated markers,

[0015] SEQ ID NOs 74-146 are DNA sequences for oil-associated genes,

[0016] SEQ ID NOs 147-219 are amino acid sequences for proteins encoded by oil-associated genes, and

[0017] SEQ ID NOs 220-2337 are amino acid sequences for proteins encoded by homologs of oil-associated genes.

In Tables 1-5:

[0018] Table 5 identifies polymorphic markers, i.e. SNPs and Indels, in each of the 73 oil-assoicated marker amplicons sequences, i.e. SEQ ID NO:1-73,

[0019] Table 2 identifies each of the 73 DNA sequences for oil-associated genes by arbitrary name of the gene and the encoded protein, i.e. SEQ ID NO:74-146,

[0020] Table 3 identifies each of the 73 amino acid sequences for proteins encoded by an oil-associated gene by annotated function, i.e. SEQ ID NO:147-219,

[0021] Table 4 identifies homologs of oil-associated genes by reference to a name assigned to a sequence in a protein database for SEQ ID NO:147-219, and

[0022] Table 5 identifies each of the amino acid sequences of proteins encoded by homologs of oil-associated genes, i.e SEQ ID NO:220-2337, by reference to the name assigned in Table 4 and indication of source organism.

As used herein certain terms are defined as follows.

[0023] An “oil-associated gene” means a nucleic acid molecule comprising at least a functional part of the open reading frame of a gene (or a homolog thereof) that either overlaps with, or is associated by linkage disequilibrium with, any one or more of the 73 genomic amplicons of SEQ ID NO:1 through SEQ ID NO:73, which contain markers having a statistically significant association with an oil trait. More particularly, oil-associated genes are found in the group consisting of:
[0024] (a) on maize chromosome 1 the genes characterized by nucleic acid sequences of SEQ ID NO: 140, 128, 108, 111, 123, 105, 131, 100, 78, 101, and 146; genes encoding proteins having an amino acid sequence selected from the group consisting of SEQ ID NO: 213, 201, 181, 184, 196, 178, 204, 173, 151, 174, and 219; and homologs thereof selected from plants, fungi, algae and bacteria;
[0025] (b) on maize chromosome 2 the genes characterized by nucleic acid sequences of SEQ ID NO: 95, 126, 82, 74, 89, 113, and 116; genes encoding proteins having an amino acid sequence selected from the group consisting of SEQ ID NO: 168, 199, 155, 147, 162, 186, and 189; and homologs thereof selected from plants, fungi, algae and bacteria;
[0026] (c) on maize chromosome 3 the genes characterized by nucleic acid sequences of SEQ ID NO: 80, 98, 94, 87, 99, 79, and 135; genes encoding proteins having an amino acid sequence selected from the group consisting of SEQ ID NO: 153, 171, 167, 160, 172, 152, and 208; and homologs thereof selected from plants, fungi, algae and bacteria;
[0027] (d) on maize chromosome 4 the genes characterized by nucleic acid sequences of SEQ ID NO: 134, 130, 110, 91, 77, 86, 97, 85, and 102; genes encoding proteins having an amino acid sequence selected from the group consisting of SEQ ID NO: 207, 203, 183, 164, 150, 159, 170, 158, and 175; and homologs thereof selected from plants, fungi, algae and bacteria;
[0028] (e) on maize chromosome 5 the genes characterized by nucleic acid sequences of SEQ ID NO: 133, 118, 117, 144, 141, 93, 139, 129, 103, and 119; genes encoding proteins having an amino acid sequence selected from the group consisting of SEQ ID NO: 206, 191, 190, 217, 214, 166, 212, 202, 176, and 192; and homologs thereof selected from plants, fungi, algae and bacteria;
[0029] (f) on maize chromosome 6 the genes characterized by nucleic acid sequences of SEQ ID NO: 75, 122, 121, 145, 84, 96, and 107; genes encoding proteins having an amino acid sequence selected from the group consisting of SEQ ID NO: 148, 195, 194, 218, 157, 169, and 180; and homologs thereof selected from plants, fungi, algae and bacteria;
[0030] (g) on maize chromosome 7 the genes characterized by nucleic acid sequences of SEQ ID NO: 114, 115, 104, 109, 143, 83, and 106; genes encoding proteins having an amino acid sequence selected from the group consisting of SEQ ID NO: 187, 188, 177, 182, 216, 156, and 179; and homologs thereof selected from plants, fungi, algae and bacteria;
[0031] (h) on maize chromosome 8 the genes characterized by nucleic acid sequences of SEQ ID NO: 112, 132, 142, 90, 124, 127, and 81; genes encoding proteins having an amino acid sequence selected from the group consisting of SEQ ID NO: 185, 205, 215, 163, 197, 200, and 154; and homologs thereof selected from plants, fungi, algae and bacteria;
[0032] (i) on maize chromosome 9 the genes characterized by nucleic acid sequences of SEQ ID NO: 120, 137, 76, 125, and 136; genes encoding proteins having an amino acid sequence selected from the group consisting of SEQ ID NO: 193, 210, 149, 198, and 209; and homologs thereof selected from plants, fungi, algae and bacteria;
[0033] (j) on maize chromosome 10 the genes characterized by nucleic acid sequences of SEQ ID NO: 138, 88, and 92; genes encoding proteins having an amino acid sequence selected from the group consisting of SEQ ID NO: 211, 161, and 165; and homologs thereof selected from plants, fungi, algae and bacteria;
[0034] (k) nucleic acid molecules comprising oligonucleotides of at least 40 consecutive nucleic acid residues of a gene in sections (a) through (j) and having at least 60%, more preferably at least 70%, even more preferably at least 80%, and most preferably at least 90% identity with a same length fragment of said gene; and
[0035] (l) nucleic acid molecules encoding proteins having amino acid sequence which has at least 80% identity, preferably at least 90% identity, to an amino acid sequence of a protein in sections (a) through (j) over a window of alignment.

[0036] An “allele” means an alternative sequence at a particular locus; the length of an allele can be as small as 1 nucleotide base but is typically larger. Allelic sequence can be amino acid sequence or nucleic acid sequence.

[0037] A “locus” is a short sequence that is usually unique and usually found at one particular location by a point of reference, e.g., a short DNA sequence that is a gene, or part of a gene or intergenic region. A locus of this invention can be a unique PCR product. The loci of this invention are polymorphic between certain individuals.

[0038] “Genotype” means the specification of an allelic composition at one or more loci within an individual organism. In the case of diploid organisms, there are two alleles at each locus; a diploid genotype is said to be homozygous when the alleles are the same, and heterozygous when the alleles are different.

[0039] “Consensus sequence” means
[0040] (a) a constructed DNA sequence that identifies SNP and Indel polymorphisms in alleles at a locus. Consensus sequence of a polymorphic locus can be based on either strand of DNA at the locus and states the nucleotide base of either one of each SNP in the locus and the nucleotide bases of all Indels in the locus. Thus, although a consensus sequence of a polymorphic locus may not be a copy of an actual DNA sequence, a consensus sequence is useful for precisely designing primers and probes for actual polymorphisms in the locus.
[0041] (b) a conserved amino acid sequence of part or all of the proteins encoded by homologous genes.

[0042] “Homolog” of an oil-associated gene as used herein means a gene from a the same or a different organism that performs the same biological function as the oil-associated gene. An orthologous relation between two organisms is not necessarily manifest as a one-to-one correspondence between two genes, because a gene can be duplicated or deleted after organism phylogenetic separation, such as speciation. So for a given gene, there may be no ortholog or more than one ortholog or the function may be performed by an alternatively spliced gene. Other complicating factors include limited gene identification, redundant copies of the same gene with different sequence lengths or corrected sequence. A local sequence alignment program, e.g. BLAST, can be used to search a database of sequences to find similar sequences, and the summary Expectation value (E-value) can be used to measure the sequence base similarity. Because query results with the best E-value for a particular organism may not necessarily be an ortholog or the only ortholog, it is necessary to use a reciprocal BLAST search to filter the hit sequences with significant E-values before calling them orthologs. The reciprocal BLAST entails search of the significant hits against a database of genes from the base organism that are similar to the query gene. A hit is a likely ortholog when the reciprocal BLAST's best hit is the query gene itself or is one of the duplicated genes of the query gene after speciation. Some skilled in the art may argue that what is called a homolog is in fact an ortholog or a paralog. Regardless, the term homolog is used herein to describe genes which are assumed to have functional similarity by inference from sequence base similarity.

[0043] “Phenotype” means the detectable characteristics of a cell or organism that are a manifestation of gene expression.

[0044] “Marker” means a polymorphic sequence. A “polymorphism” is a variation among individuals in sequence, particularly in DNA sequence. Useful polymorphisms include a single nucleotide polymorphisms (SNPs) and insertions or deletions in DNA sequence (Indels).

[0045] “Maize oil marker” means a marker in any one of the genomic amplicons of SEQ ID NO:1 through SEQ ID NO:73 and markers in linkage disequilibrium with a marker in said amplicons.

[0046] “Marker assay” means a method for detecting a polymorphism at a particular locus using a particular method, e.g., phenotype (such as seed color, flower color, or other visually detectable trait), restriction fragment length polymorphism (RFLP), single base extension, electrophoresis, sequence alignment, allelic specific oligonucleotide hybridization (ASO), RAPID, etc. Preferred marker assays include single base extension as disclosed in U.S. Pat. No. 6,013,431 and allelic discrimination where endonuclease activity releases a reporter dye from a hybridization probe as disclosed in U.S. Pat. No. 5,538,848, the disclosures of both of which are incorporated herein by reference.

[0047] “Linkage” refers to relative frequency at which types of gametes are produced in a cross. For example, if locus A has alleles “A” or “a” and locus B has alleles “B” or “b,” a cross between parent 1 with AABB genotype and parent II with aabb genotype will produce four possible gametes where the haploid genotypes are segregated into AB, Ab, aB and ab. The null expectation is that there will be independent and equal segregation into each of the four possible genotypes, i.e., with no linkage, ¼ of the gametes will be of each genotype. Segregation of gametes into a genotypes differing from ¼ are attributed to linkage. Two loci are said to be “genetically linked” when they show this deviation from the expected equal frequency of ¼.

[0048] “Linkage disequilibrium” is defined in the context of the relative frequency of gamete types in a population of many individuals in a single generation. If the frequency of allele A is p, a is p′, B is q and b is q′, then the expected frequency (with no linkage disequilibrium) of genotype AB is pq, Ab is pq′, aB is p′q and ab is p′q′. Any deviation from the expected frequency is called linkage disequilibrium.

[0049] “Quantitative Trait Locus (QTL)” means a locus that controls to some degree numerically representable traits that are usually continuously distributed.

[0050] “Haplotype” means the genotype for multiple loci or genetic markers in a haploid gamete. Generally, these loci or markers reside within a relatively small and defined region of a chromosome. A preferred haplotype comprises the 10 cM region or the 5 cM region or the 2 cM region surrounding an informative marker having a significant association with oil.

[0051] “Hybridizing” means the capacity of two nucleic acid molecules or fragments thereof to form anti-parallel, double-stranded nucleotide structure. The nucleic acid molecules of this invention are capable of hybridizing to other nucleic acid molecules under certain circumstances. A nucleic acid molecule is said to be the “complement” of another nucleic acid molecule if the molecules exhibit “complete complementarity,” i.e., each nucleotide in one sequence is complementary to its base pairing partner nucleotide in another sequence. Two molecules are said to be “minimally complementary” if they can hybridize to one another with sufficient stability to permit them to remain annealed to one another under at least conventional “low-stringency” conditions. Similarly, the molecules are said to be “complementary” if they can hybridize to one another with sufficient stability to permit them to remain annealed to one another under conventional “high-stringency” conditions. Nucleic acid molecules that hybridize to other nucleic acid molecules, e.g., at least under low stringency conditions are said to be “hybridizable cognates” of the other nucleic acid molecules. Conventional stringency conditions are described by Sambrook et al., Molecular Cloning, A Laboratory Manual, 2nd Ed., Cold Spring Harbor Press, Cold Spring Harbor, N.Y. (1989) and by Haymes et al., Nucleic Acid Hybridization, A Practical Approach, IRL Press, Washington, D.C. (1985), each of which is incorporated herein by reference. Departures from complete complementarity are therefore permissible, as long as such departures do not completely preclude the capacity of the molecules to form a double-stranded structure. Thus, in order for a nucleic acid molecule to serve as a primer or probe, it need only be sufficiently complementary in sequence to be able to form a stable double-stranded structure under the particular solvent and salt concentrations employed. Appropriate stringency conditions that promote DNA hybridization, for example, 6.0× sodium chloride/sodium citrate (SSC) at about 45° C., followed by a wash of 2.0×SSC at 50° C., are known to those skilled in the art or can be found in Current Protocols in Molecular Biology, John Wiley & Sons, N.Y. (1989), 6.3.1-6.3.6, incorporated herein by reference. For example, the salt concentration in the wash step can be selected from a low stringency of about 2.0×SSC at 50° C. to a high stringency of about 0.2×SSC at 50° C. In addition, the temperature in the wash step can be increased from low stringency conditions at room temperature, about 22° C., to high stringency conditions at about 65° C. Both temperature and salt may be varied, or either the temperature or the salt concentration may be held constant while the other variable is changed.

[0052] “Sequence identity” refers to the extent to which two optimally aligned DNA or amino acid sequences are invariant throughout a window of alignment of components, e.g., nucleotides or amino acids. An “identity fraction” for aligned segments of a test sequence and a reference sequence is the number of identical components that are shared by the two aligned sequences divided by the total number of components in reference sequence segment, i.e., the entire reference sequence or a smaller defined part of the reference sequence. “Percent identity” is the identity fraction times 100. Optimal alignment of sequences for aligning a comparison window are well known to those skilled in the art and may be conducted by tools such as the local homology algorithm of Smith and Waterman, the homology alignment algorithm of Needleman and Wunsch, the search for similarity method of Pearson and Lipman, and preferably by computerized implementations of these algorithms such as GAP, BESTFIT, FASTA, and TFASTA available as part of the GCG® Wisconsin Package® (Accelrys Inc. Burlington, Mass.). Polynucleotides of the present invention that are variants of the polynucleotides provided herein will generally demonstrate significant identity with the polynucleotides provided herein. Of particular interest are DNA homologs having at least about 70% sequence identity, at least about 80% sequence identity, at least about 90% sequence identity, and more preferably even greater, such as 98% or 99% sequence identity with DNA sequences of an oil-associated gene described herein. Homologous DNA can be characterized by the cognate encoded protein and will have at least 80%, preferably at least 90% identity with amino acid sequence of a protein encoded by an oil-associated gene.

[0053] “Genetic transformation” means a process of introducing a DNA construct (e.g., a vector or expression cassette) into a cell or protoplast in which that exogenous DNA is incorporated into a chromosome or is capable of autonomous replication.

[0054] “Exogenous gene” means a gene or partial gene that is not normally present in a given host genome in the exogenous gene's present form. In this respect, the gene itself may be native to the host genome; however, the exogenous gene will comprise the native gene altered by the addition or deletion of one or more different regulatory elements.

[0055] “Expression” means the combination of intracellular processes, including transcription and translation undergone by a coding DNA molecule such as a structural gene to produce a polypeptide.

[0056] “Progeny” means any subsequent generation, including the seeds and plants therefrom, that is derived from a particular parental plant or set of parental plants.

[0057] “Promoter” means a recognition site on a DNA sequence or group of DNA sequences that provides an expression control element for a structural gene and to which RNA polymerase specifically binds and initiates RNA synthesis (transcription) of that gene.

[0058] “R₀ transgenic plant” means a plant that has been directly transformed with a selected DNA or has been regenerated from a cell or cell cluster that has been transformed with a selected DNA.

[0059] “Regeneration” means the process of growing a plant from a plant cell (e.g., plant protoplast, callus or explant).

[0060] “DNA construct” means a chimeric DNA molecule that is designed for introduction into a host genome by genetic transformation. Preferred DNA constructs will comprise all of the genetic elements necessary to direct the expression of one or more exogenous genes. In particular embodiments of the instant invention, it may be desirable to introduce a DNA construct into a host cell in the form of an expression cassette.

[0061] “Transformed cell” means a cell the DNA complement of which has been altered by the introduction of an exogenous DNA molecule into that cell.

[0062] “Transgene” means a segment of DNA that has been incorporated into a host genome or is capable of autonomous replication in a host cell and is capable of causing the expression of one or more cellular products. Exemplary transgenes will provide the host cell, or plants regenerated therefrom, with a novel phenotype relative to the corresponding non-transformed cell or plant. Transgenes may be directly introduced into a plant by genetic transformation or may be inherited from a plant of any previous generation that was transformed with the DNA segment.

[0063] “Transgenic plant” means a plant or progeny plant of any subsequent generation derived therefrom, wherein the DNA of the plant or progeny thereof contains an introduced exogenous DNA segment not originally present in a non-transgenic plant of the same strain. The transgenic plant may additionally contain sequences that are native to the plant being transformed, but wherein the “exogenous” gene has been altered in order to alter the level or pattern of expression of the gene.

[0064] “Transit peptide” means a polypeptide sequence that is capable of directing a polypeptide to a particular organelle or other location within a cell.

[0065] “Vector” means a DNA molecule capable of replication in a host cell and/or to which another DNA segment can be operatively linked so as to bring about replication of the attached segment. A plasmid is an exemplary vector.

[0066] “Purified” refers to a nucleic acid molecule or polypeptide separated from substantially all other molecules normally associated with it in its native state. More preferably, a substantially purified molecule is the predominant species present in a preparation. A substantially purified molecule may be greater than 60% free or 75% free or 90% free or 95% free from the other molecules (exclusive of solvent) present in the natural mixture. The terms “isolated and purified” and “substantially purified” are not intended to encompass molecules present in their native state.

[0067] As used herein “yield” means the production of a crop, e.g. shelled corn kernels or soybean or cotton fiber, per unit of production area, e.g. in bushels per acre or metric tons per hectare, often reported on a moisture adjusted basis, e.g. corn is typically reported at 15.5% moisture. Moreover a bushel of corn is defined by law in the State of Iowa as 56 pounds by weight, a useful conversion factor for corn yield is: 100 bushels per acre is equivalent to 6.272 metric tons per hectare. Other measurements for yield are in common practice.

[0068] The molecules and organisms of the invention may also be “recombinant,” which describes (a) nucleic acid molecules that are constructed or modified outside of cells and that can replicate or function in a living cell, (b) molecules that result from the transcription, replication or translation of recombinant nucleic acid molecules, or (c) organisms that contain recombinant nucleic acid molecules or are modified using recombinant nucleic acid molecules.

[0069] As used herein a “transgenic” organism, e.g. plant or seed, is one whose genome has been altered by the incorporation of exogenous genetic material or additional copies of native genetic material, e.g. by transformation or recombination of the organism or an ancestor organism. Transgenic plants include progeny plants of an original plant derived from a transformation process including progeny of breeding transgenic plants with wild type plants or other transgenic plants. Crop plants of interest in the present invention include, but are not limited to maize, soybean, cotton, canola (rape), sunflower, safflower and flax.

[0070] “Enhanced oil” in a transgenic cell or organism having recombinant DNA comprising an oil-associated gene is determined by reference to cell or organism without that recombinant DNA, e.g. a wild-type plant, a non-recombinant ancestor plant line or a negative segregant progeny from a hemizygous transgenic plant. Enhanced oil can be determined by direct or indirect measurement. Enhanced oil activity can be achieved by linking a constitutive promoter to an oil-associated gene. Reduced oil can also be achieved through genetic engineering of oil-associated genes, e.g. by a variety of mechanisms including anti-sense, co-suppression, double stranded RNA (dsRNA), mutation or knockout.

[0071] As used herein “gene suppression” means any of the well-known methods for suppressing expression of protein. Posttranscriptional gene suppression is mediated by transcription of integrated recombinant DNA to form double-stranded RNA (dsRNA) having homology to a gene targeted for suppression. This formation of dsRNA most commonly results from transcription of an integrated inverted repeat of the target gene, and is a common feature of gene suppression methods known as anti-sense suppression, co-suppression and RNA interference (RNAi). See Redenbaugh et al. in “Safety Assessment of Genetically Engineered Flavr Savr™ Tomato, CRC Press, Inc. (1992); Jorgensen et al., Mol. Gen. Genet., 207:471-477 (1987); and Stam et al., The Plant Journal, 12(1), 63-82 (1997). Methods for such gene suppression are disclosed in U.S. Pat. No. 5,107,065 (Shewmaker et al.); U.S. Pat. No. 5,283,184 (Jorgensen et al.); U.S. Pat. No. 6,326,193 U.S. Pat. No. 6,506,559 (Fire et al.); U.S. 2002/0048814 A1 (Oeller); U.S. 2003/0018993 A1 (Gutterson et al.); U.S. 2003/0175965 A1 (Lowe et al.); U.S. 2003/0036197 A1 (Glassman et al.); U.S. patent application Ser. No. 10/465,800 (Fillatti), and U.S. application Ser. No. 10/393,347 (Shewmaker et al.), incorporated herein by reference. Transcriptional suppression can be mediated by a transcribed dsRNA having homology to a promoter DNA sequence to effect what is called promoter trans suppression. Constructs useful for such gene suppression mediated by promoter trans suppression are disclosed by Mette et al., The EMBO Journal, Vol. 18, No. 1, pp. 241-148, 1999 and by Mette et al., The EMBO Journal, Vol. 19, No. 19, pp. 5194-5201-148, 2000. Suppression of an oil-associated gene by RNAi can be achieved using a recombinant DNA construct having a promoter operably linked to a DNA element comprising a sense and anti-sense element of a segment of genomic DNA of the oil-associated gene, e.g. a segment of at least about 23 nucleotides, more preferably about 50 to 200 nucleotides where the sense and anti-sense DNA components can be directly linked or joined by an intron or artificial DNA segment that can form a loop when the transcribed RNA hybridizes to form a hairpin structure. For example, genomic DNA from a polymorphic locus of SEQ ID NO:1 through SEQ ID NO:73 can be used in a recombinant construct for suppression of a cognate oil-associated gene by RNAi suppression.

[0072] Characteristics of Oil-Associated Genes

[0073] This invention provides nucleic acid molecules comprising DNA sequence representing oil-associated genes having a nucleic acid sequence of SEQ ID NO:74 through SEQ ID NO:146 or fragments of such oil-associated genes such as substantial parts of oil-associated genes providing the protein coding sequence part of the oil-associated gene. The oil-associated genes of this invention have been identified by marker trait association.

[0074] Homologous oil-associated genes have been identified in other plants and in other organisms such as fungi, algae and bacteria using the nucleic acid sequence of a known oil-associated gene or the amino acid sequence of a protein encoded by an oil-associated gene in any of a variety of search algorithms, e.g. the BLAST search algorithm, in public or proprietary DNA and protein databases. Existence of a gene is inferred if significant sequence similarity extends over the sequence of the target gene. Because homology-based methods may overlook genes unique to the source organism, for which homologous nucleic acid molecules have not yet been identified in databases, gene prediction programs are also used. Gene prediction programs generally use “signals” in the sequence, such as splice sites or “content” statistics, such as codon bias; to predict gene structures (Stormo, Genome Research 10: 394-397, 2000). Proteins encoded by homologs of oil-associated genes are identified by reference to Tables 4 and 5 have amino acid sequences of SEQ IS NO:220 through SEQ ID NO:2337.

[0075] With respect to nucleotide sequences, degeneracy of the genetic code provides the possibility to substitute at least one base of the base sequence of a gene with a different base without causing the amino acid sequence of the polypeptide produced from the gene to be changed. Hence, the DNA of the present invention may also have any codon changed in a sequence of SEQ ID NO: 1 through SEQ ID NO: 146 by substitution in accordance with degeneracy of genetic code. See U.S. Pat. No. 5,500,365, incorporated herein by reference.

[0076] More particularly, the homologous oil-associated genes can be characterized by reference to an artificial consensus sequence of conserved amino acids determined from an alignment of protein sequence encoded by such homologs.

[0077] Characteristics of Maize Oil Markers

[0078] The maize loci of this invention comprise a DNA sequence that comprises at least 20 consecutive nucleotides and includes or is adjacent to one or more polymorphisms identified in Table 1. Such maize loci have a nucleic acid sequence having at least 90% sequence identity or at least 95% or for some alleles at least 98% and in many cases at least 99% sequence identity, to the sequence of the same number of nucleotides in either strand of a segment of maize DNA that includes or is adjacent to the polymorphism. The nucleotide sequence of one strand of such a segment of maize DNA may be found in a polymorphic locus with a sequence in the group consisting of SEQ ID NO:1 through SEQ ID NO:73. It is understood by the very nature of polymorphisms that for at least some alleles there will be no identity to the polymorphism, per se. Thus, sequence identity can be determined for sequence that is exclusive of the polymorphism sequence. The polymorphisms in each locus are identified more particularly in Table 1.

[0079] For many genotyping applications it is useful to employ as markers polymorphisms from more than one locus. Thus, aspects of the invention use a collection of different loci. The number of loci in such a collection can vary but will be a finite number, e.g., as few as 2 or 5 or 10 or 25 loci or more, for instance up to 40 or 75 or 100 or more loci.

[0080] Another aspect of the invention provides nucleic acid molecules that are capable of hybridizing to the polymorphic maize loci of this invention, e.g. PCR primers and hybridization probes. In certain embodiments of the invention, e.g., which provide PCR primers, such molecules comprise at least 15 nucleotide bases. Molecules useful as primers can hybridize under high stringency conditions to one of the strands of a segment of DNA in a polymorphic locus of this invention. Primers for amplifying DNA are provided in pairs, i.e., a forward primer and a reverse primer. One primer will be complementary to one strand of DNA in the locus and the other primer will be complementary to the other strand of DNA in the locus, i.e., the sequence of a primer is at least 90% or at least 95% identical to a sequence of the same number of nucleotides in one of the strands. It is understood that such primers can hybridize to a sequence in the locus that is distant from the polymorphism, e.g., at least 5, 10, 20, 50 or up to about 100 nucleotide bases away from the polymorphism. Design of a primer of this invention will depend on factors well known in the art, e.g., avoidance of repetitive sequence.

[0081] Another aspect of the nucleic acid molecules of this invention are hybridization probes for polymorphism assays. In one aspect of the invention such probes are oligonucleotides comprising at least 12 nucleotide bases and a detectable label. The purpose of such a molecule is to hybridize, e.g., under high stringency conditions, to one strand of DNA in a segment of nucleotide bases that includes or is adjacent to the polymorphism of interest in an amplified part of a polymorphic locus. Such oligonucleotides are at least 90% or at least 95% identical to the sequence of a segment of the same number of nucleotides in one strand of maize DNA in a polymorphic locus. The detectable label can be a radioactive element or a dye. In preferred aspects of the invention, the hybridization probe further comprises a fluorescent label and a quencher, e.g., for use in hybridization probe assays of the type known as Taqman assays, available from Applied Biosystems of Foster City, Calif.

[0082] For assays where the molecule is designed to hybridize adjacent to a polymorphism that is detected by single base extension, e.g., of a labeled dideoxynucleotide, such molecules can comprise at least 15 or at least 16 or 17 nucleotide bases in a sequence that is at least 90% or at least 95% identical to a sequence of the same number of consecutive nucleotides in either strand of a segment of polymorphic maize DNA. Oligonucleotides for single base extension assays are available from Orchid Biosystems.

[0083] Such primer and probe molecules are generally provided in groups of two primers and one or more probes for use in genotyping assays. Moreover, it is often desirable to conduct a plurality of genotyping assays for a plurality of polymorphisms. Thus, this invention also provides collections of nucleic acid molecules, e.g., in sets that characterize a plurality of polymorphisms.

[0084] Characteristics of Protein and Polypeptide Molecules

[0085] The nucleic acid molecules of this invention encode certain protein or smaller polypeptide molecules including those having an amino acid sequence of SEQ ID NO: 147 through SEQ ID NO: 219. Homologs of the polypeptides of the present invention may be identified by comparison of the amino acid sequence of the polypeptide to amino acid sequences of polypeptides from the same or different plant sources, e.g. manually or by using known homology-based search algorithms such as those commonly known and referred to as BLAST, FASTA, and Smith-Waterman.

[0086] A further aspect of the invention comprises functional homolog proteins which differ in one or more amino acids from those of a polypeptide provided herein as the result of one or more of the well-known conservative amino acid substitutions, e.g. valine is a conservative substitute for alanine and threonine is a conservative substitute for serine. Conservative substitutions for an amino acid within the native polypeptide sequence can be selected from other members of a class to which the naturally occurring amino acid belongs. Representative amino acids within these various classes include, but are not limited to: (1) acidic (negatively charged) amino acids such as aspartic acid and glutamic acid; (2) basic (positively charged) amino acids such as arginine, histidine, and lysine; (3) neutral polar amino acids such as glycine, serine, threonine, cysteine, tyrosine, asparagine, and glutamine; and (4) neutral nonpolar (hydrophobic) amino acids such as alanine, leucine, isoleucine, valine, proline, phenylalanine, tryptophan, and methionine. Conserved substitutes for an amino acid within a native amino acid sequence can be selected from other members of the group to which the naturally occurring amino acid belongs. For example, a group of amino acids having aliphatic side chains is glycine, alanine, valine, leucine, and isoleucine; a group of amino acids having aliphatic-hydroxyl side chains is serine and threonine; a group of amino acids having amide-containing side chains is asparagine and glutamine; a group of amino acids having aromatic side chains is phenylalanine, tyrosine, and tryptophan; a group of amino acids having basic side chains is lysine, arginine, and histidine; and a group of amino acids having sulfur-containing side chains is cysteine and methionine. Naturally conservative amino acids substitution groups are: valine-leucine, valine-isoleucine, phenylalanine-tyrosine, lysine-arginine, alanine-valine, aspartic acid-glutamic acid, and asparagine-glutamine. A further aspect of the invention comprises polypeptides which differ in one or more amino acids from those of a described protein sequence as the result of deletion or insertion of one or more amino acids in a native sequence.

[0087] Recombinant DNA Constructs for Plant Transformation

[0088] The present invention contemplates the use of polynucleotides which encode a protein effective for imparting altered oil levels in plants. Such polynucleotides are assembled in recombinant DNA constructs using methods known to those of ordinary skill in the art. A useful technology for building DNA constructs and vectors for transformation is the GATEWAY™ cloning technology (available from Invitrogen Life Technologies, Carlsbad, Calif.) uses the site specific recombinase LR cloning reaction of the Integrase/att system from bacteriophage lambda vector construction, instead of restriction endonucleases and ligases. The LR cloning reaction is disclosed in U.S. Pat. Nos. 5,888,732 and 6,277,608, U.S. Patent Application Publications 2001283529, 2001282319 and 20020007051, all of which are incorporated herein by reference. The GATEWAY™ Cloning Technology Instruction Manual which is also supplied by Invitrogen also provides concise directions for routine cloning of any desired DNA into a vector comprising operable plant expression elements.

[0089] Transgenic DNA constructs used for transforming plant cells will comprise the heterologous DNA which one desires to introduced into and a promoter to express the heterologous DNA in the host maize cells. As is well known in the art such constructs typically also comprise a promoter and other regulatory elements, 3′ untranslated regions (such as polyadenylation sites), transit or signal peptides and marker genes elements as desired. For instance, see U.S. Pat. Nos. 5,858,642 and 5,322,938 which disclose versions of the constitutive promoter derived from cauliflower mosaic virus (CaMV35S), U.S. Pat. No. 6,437,217 which discloses a maize RS81 promoter, U.S. Pat. No. 5,641,876 which discloses a rice actin promoter, U.S. Pat. No. 6,426,446 which discloses a maize RS324 promoter, U.S. Pat. No. 6,429,362 which discloses a maize PR-1 promoter, U.S. Pat. No. 6,232,526 which discloses a maize A3 promoter, U.S. Pat. No. 6,177,611 which discloses constitutive maize promoters, U.S. Pat. No. 6,433,252 which discloses a maize L3 oleosin promoter, U.S. Pat. No. 6,429,357 which discloses a rice actin 2 promoter and intron, U.S. Pat. No. 5,837,848 which discloses a root specific promoter, U.S. Pat. No. 6,084,089 which discloses cold inducible promoters, U.S. Pat. No. 6,294,714 which discloses light inducible promoters, U.S. Pat. No. 6,140,078 which discloses salt inducible promoters, U.S. Pat. No. 6,252,138 which discloses pathogen inducible promoters, U.S. Pat. No. 6,175,060 which discloses phosphorus deficiency inducible promoters, U.S. Patent Application Publication 2002/0192813A1 which discloses 5′, 3′ and intron elements useful in the design of effective plant expression vectors, U.S. patent application Ser. No. 09/078,972 which discloses a coixin promoter, U.S. patent application Ser. No. 09/757,089 which discloses a maize chloroplast aldolase promoter, all of which are incorporated herein by reference.

[0090] In many aspects of the invention it is preferred that the promoter element in the DNA construct should be seed or kernel tissue specific. Such promoters can be identified and isolated by those skilled in the art from the regulatory region of plant genes which are over expressed in seed tissue, e.g. embryo or endosperm. For example, specific seed tissue-specific promoters for use in this invention include an L3 oleosin promoter as disclosed in U.S. Pat. No. 6,433,252, a gamma coixin promoter as disclosed in U.S. patent application Ser. No. 09/078,972, and emb5 promoter as disclosed in U.S. provisional application Ser. No. 60/434,242, all of which are incorporated herein by reference.

[0091] In general, it is preferred to introduce heterologous DNA randomly, i.e. at a non-specific location, in the plant genome. In special cases, it may be useful to target heterologous DNA insertion in order to achieve site specific integration, e.g. to replace an existing gene in the genome. In some other cases it may be useful to target a heterologous DNA integration into the genome at a predetermined site from which it is known that gene expression occurs. Several site specific recombination systems exist which are known to function in plants and include cre-lox as disclosed in U.S. Pat. No. 4,959,317 and FLP-FRT as disclosed in U.S. Pat. No. 5,527,695, both incorporated herein by reference.

[0092] Constructs and vectors may also include a transit peptide for targeting of a gene target to a plant organelle, particularly to a chloroplast, leucoplast or other plastid organelle. For a description of the use of a chloroplast transit peptide see U.S. Pat. No. 5,188,642, incorporated herein by reference.

[0093] In practice, DNA is introduced into only a small percentage of target cells in any one experiment. Selectable marker genes are used to provide an efficient system for identification of those cells that are stably transformed by receiving and integrating a transgenic DNA construct into their genomes. Preferred selectable marker genes confer resistance to a selective agent, such as an antibiotic or herbicide. Potentially transformed cells are exposed to the selective agent. In the population of surviving cells will be those cells where, generally, the resistance-conferring gene has been integrated and expressed at sufficient levels to permit cell survival. Cells may be tested further to confirm stable integration of the exogenous DNA. Useful selectable marker genes include those conferring resistance to antibiotics such as kanamycin (nptII), hygromycin B (aph IV) and gentamycin (aac3 and aacC4) or resistance to herbicides such as glufosinate (bar or pat) and glyphosate (EPSPS). Examples of such selectable marker genes are illustrated in U.S. Pat. Nos. 5,550,318; 5,633,435; 5,780,708 and 6,118,047, all of which are incorporated herein by reference. Screenable markers which provide an ability to visually identify transformants can also be employed, e.g., a gene expressing a colored or fluorescent protein such as a luciferase or green fluorescent protein (GFP) or a gene expressing a beta-glucuronidase or uidA gene (GUS) for which various chromogenic substrates are known.

[0094] Exogenous Oil-Associated Genes for Modification of Plant Phenotypes

[0095] A particularly important advance of the present invention is that it provides DNA sequences useful for producing desirable oil-related phenotypes in plants, preferably in crop plants such as soybean, cotton, canola, sunflower, safflower, flax and most preferably in maize.

[0096] The choice of a selected DNA sequence for expression in a plant host cell in accordance with the invention will depend on the purpose of gene expression, e.g., expression of a native gene or homolog by a constitutive promoter, over expression of a native gene or homolog, suppression of a native gene, or altered tissue- or stage-specific expression of a native gene or homolog by a tissue- or stage-specific promoter.

[0097] In certain embodiments of the invention, transformation of a recipient cell may be carried out with more than one exogenous DNA coding region. As used herein, an “exogenous coding region” or “selected coding region” is a coding region not normally found in the host genome in an identical context. By this, it is meant that the coding region may be isolated from a different species than that of the host genome, or alternatively, isolated from the host genome, but it is operably linked to one or more regulatory regions that differ from those found in the unaltered, native gene. Two or more exogenous coding regions also can be supplied in a single transformation event using either distinct transgene-encoding vectors, or using a single vector incorporating two or more coding sequences.

[0098] Enhancement of an oil-related trait can also be effected by suppression of one or more genes that express proteins that divert oil producing materials into competing products or that degrade oil products. Site-directed inactivation of a gene, while possible, is typically difficult to achieve. Other more effective methods of gene suppression include the use anti-sense RNA, co-suppression, interfering RNA, processing defective RNA, transposon tagging, backcrossing or homologous recombination. Post transcriptional gene suppression by RNA interference is a superior and preferred method of gene suppression. In a preferred embodiment gene suppression may complement over expression of an oil-associated gene.

[0099] Transformation Methods and Transgenic Plants

[0100] Methods and compositions for transforming plants by introducing a transgenic DNA construct into a plant genome in the practice of this invention can include any of the well-known and demonstrated methods. Preferred methods of plant transformation are microprojectile bombardment as illustrated in U.S. Pat. Nos. 5,015,580; 5,550,318; 5,538,880; 6,160,208: 6,194,636 and 6,399,861 and Agrobacterium-mediated transformation as illustrated in U.S. Pat. Nos. 5,824,877; 5,591,616; 5,981,840 and 6,384,301, all of which are incorporated herein by reference. See also U.S. application Ser. No. 09/823,676, incorporated herein by reference, for a description of vectors, transformation methods, and production of transformed Arabidopsis thaliana plants where genes in a recombinant DNA construct are constitutively expressed by a CaMV35S promoter.

[0101] Transformation methods of this invention to provide plants with enhanced environmental stress tolerance are preferably practiced in tissue culture on media and in a controlled environment. “Media” refers to the numerous nutrient mixtures that are used to grow cells in vitro, that is, outside of the intact living organism. Recipient cell targets include, but are not limited to, meristem cells, callus, immature embryos and gametic cells such as microspores, pollen, sperm and egg cells. It is contemplated that any cell from which a fertile plant may be regenerated is useful as a recipient cell. Callus may be initiated from tissue sources including, but not limited to, immature embryos, seedling apical meristems, microspores and the like. Those cells which are capable of proliferating as callus also are recipient cells for genetic transformation. Practical transformation methods and materials for making transgenic plants of this invention, e.g. various media and recipient target cells, transformation of immature embryos and subsequent regeneration of fertile transgenic plants are disclosed in U.S. Pat. No. 6,194,636 and U.S. patent application Ser. No. 09/757,089, which are incorporated herein by reference.

[0102] Regeneration and Seed Production

[0103] Cells that survive the exposure to the selective agent, or cells that have been scored positive in a screening assay, may be cultured in media that supports regeneration of plants. Such media is well-known to one of skill in the art.

[0104] The transformed cells, identified by selection or screening and cultured in an appropriate medium that supports regeneration, will then be allowed to mature into plants. Developing plantlets are transferred to soil-less plant growth mix, and hardened off, e.g., in an environmentally controlled chamber at about 85% relative humidity, 600 ppm CO₂, and 25-250 microeinsteins m⁻²s⁻¹ of light, prior to transfer to a greenhouse or growth chamber for maturation. Plants are preferably matured either in a growth chamber or greenhouse. Plants are regenerated from about 6 wk to 10 months after a transformant is identified, depending on the initial tissue. During regeneration, cells are grown on solid media in tissue culture vessels. Regenerating plants are preferably grown at about 19° C. to 28° C. After the regenerating plants have reached the stage of shoot and root development, they may be transferred to a greenhouse for further growth and testing. Plants may be pollinated using conventional plant breeding methods known to those of skill in the art and seed produced.

[0105] Progeny may be recovered from transformed plants and tested for expression of the exogenous expressible gene. The transgenic seeds of this invention can be harvested from fertile transgenic plants and be used to grow progeny generations of transformed plants of this invention, including hybrid plants; said progeny generations will contain the DNA construct expressing an oil-associated gene which provides the benefits of enhanced oil production and/or storage.

[0106] Seeds of R₀ transformed plants may occasionally require embryo rescue due to cessation of seed development and premature senescence of plants. To rescue developing embryos, they are excised from surface-disinfected seeds 10-20 days post-pollination and cultured. An embodiment of media used for culture at this stage comprises MS salts, 2% sucrose, and 5.5 g/l agarose. In embryo rescue, large embryos (defined as greater than 3 mm in length) are germinated directly on an appropriate media. Embryos smaller than that may be cultured for 1 wk on media containing the above ingredients along with 10⁻⁵M abscisic acid and then transferred to growth regulator-free medium for germination.

[0107] Characterization of Transgenic Plants for Presence of Exogenous DNA

[0108] To confirm the presence of the exogenous DNA in regenerating plants, a variety of assays may be performed. Such assays include, for example, “molecular biological” assays, such as Southern and Northern blotting and PCR; “biochemical” assays, such as detecting the presence of RNA, e.g., double-stranded RNA, or a protein product, e.g., by immunological means (ELISAs and Western blots) or by enzymatic function; plant part assays, such as leaf or root assays; and also, by analyzing the phenotype of the whole regenerated plant. Genomic DNA may be isolated from callus cell lines or any plant parts to determine the presence of the exogenous gene through the use of techniques well known to those skilled in the art.

[0109] The presence of DNA elements introduced through the methods of this invention may be determined by polymerase chain reaction (PCR). Using this technique, discreet fragments of DNA are amplified and detected by gel electrophoresis. This type of analysis permits one to determine whether a gene is present in a stable transformant, but it does not necessarily prove integration of the introduced gene into the host cell genome. Typically, DNA has been integrated into the genome of all transformants that demonstrate the presence of the gene through PCR analysis. In addition, it is not possible using PCR techniques to determine whether transformants have exogenous genes introduced into different sites in the genome, i.e., whether transformants are of independent origin. Using PCR techniques it is possible to clone fragments of the host genomic DNA adjacent to an introduced gene.

[0110] Positive proof of DNA integration into the host genome and the independent identities of transformants may be determined using the technique of Southern hybridization. Using this technique, specific DNA sequences that were introduced into the host genome and flanking host DNA sequences can be identified. Hence the Southern hybridization pattern of a given transformant serves as an identifying characteristic of that transformant. In addition, it is possible through Southern hybridization to demonstrate the presence of introduced genes in high molecular weight DNA, i.e., confirm that the introduced gene has been integrated into the host cell genome. The technique of Southern hybridization provides information that can be obtained using PCR, e.g., the presence of a gene, but also demonstrates integration into the genome and characterizes each individual transformant. It is contemplated that using the techniques of dot or slot blot hybridization, which are modifications of Southern hybridization techniques, one could obtain the same information that is derived from PCR, e.g., the presence of a gene.

[0111] Both PCR and Southern hybridization techniques can be used to demonstrate transmission of a transgene to progeny. In most instances the characteristic Southern hybridization pattern for a given transformant will segregate in progeny as one or more Mendelian genes, indicating stable inheritance of the transgene.

[0112] Further information about the nature of the RNA product may be obtained by Northern blotting. This technique will demonstrate the presence of an RNA species and give information about the integrity of that RNA. The presence or absence of an RNA species also can be determined using dot or slot blot Northern hybridizations. These techniques are modifications of Northern blotting and will only demonstrate the presence or absence of an RNA species. It is further contemplated that TAQMAN® technology (Applied Biosystems, Foster City, Calif.) may be used to quantitate both DNA and RNA in a transgenic cell.

[0113] Although Southern blotting and PCR may be used to detect the gene(s) in question, they do not provide information as to whether the gene is being expressed. Expression may be evaluated by specifically identifying the protein products of the introduced genes or evaluating the phenotypic changes brought about by their expression. The unique structures of individual proteins offer opportunities for use of specific antibodies to detect their presence in formats such as an ELISA assay. Combinations of approaches may be employed with even greater specificity such as Western blotting in which antibodies are used to locate individual gene products that have been separated by electrophoretic techniques. Additional techniques may be employed to absolutely confirm the identity of the product of interest such as evaluation by amino acid sequencing following purification.

[0114] Event-Specific Transgene Assays

[0115] Southern blotting, PCR and RT-PCR techniques can be used to identify the presence or absence of a given transgene but, depending upon experimental design, may not specifically and uniquely identify identical or related transgene constructs located at different insertion points within the recipient genome. To more precisely characterize the presence of transgenic material in a transformed plant, one skilled in the art could identify the point of insertion of the transgene and, using the sequence of the recipient genome flanking the transgene, develop an assay that specifically and uniquely identifies a particular insertion event. Many methods can be used to determine the point of insertion such as, but not limited to, Genome Walker™ technology (CLONTECH, Palo Alto, Calif.), Vectorette™ technology (Sigma, St. Louis, Mo.), restriction site oligonucleotide PCR, uneven PCR, and generation of genomic DNA clones containing the transgene of interest in a vector such as, but not limited to, lambda phage.

[0116] Once the sequence of the genomic DNA directly adjacent to the transgenic insert on either or both sides has been determined, one skilled in the art can develop an assay to specifically and uniquely identify the insertion event. For example, two oligonucleotide primers can be designed, one wholly contained within the transgene and one wholly contained within the flanking sequence, that can be used together with the PCR technique to generate a PCR product unique to the inserted transgene. In one embodiment, the two oligonucleotide primers for use in PCR could be designed such that one primer is complementary to sequences in both the transgene and adjacent flanking sequence such that the primer spans the junction of the insertion site while the second primer could be homologous to sequences contained wholly within the transgene. In another embodiment, the two oligonucleotide primers for use in PCR could be designed such that one primer is complementary to sequences in both the transgene and adjacent flanking sequence such that the primer spans the junction of the insertion site while the second primer could be homologous to sequences contained wholly within the genomic sequence adjacent to the insertion site. Confirmation of the PCR reaction may be monitored by, but not limited to, size analysis on gel electrophoresis, sequence analysis, hybridization of the PCR product to a specific radiolabeled DNA or RNA probe or to a molecular beacon, or use of the primers in conjugation with a TAQMAN™ probe and technology (Applied Biosystems, Foster City, Calif.)

[0117] Site-Specific Integration or Excision of Transgenes

[0118] It is specifically contemplated by the inventors that one could employ techniques for the site-specific integration or excision of transformation constructs prepared in accordance with the instant invention. An advantage of site-specific integration or excision is that it can be used to overcome problems associated with conventional transformation techniques, in which transformation constructs typically randomly integrate into a host genome and multiple copies of a construct may integrate. Site-specific integration can be achieved in plants by means of homologous recombination as disclosed, for example, in U.S. Pat. Nos. 5,527,695 and 5,658,772, incorporated herein by reference.

[0119] Deletion of Sequences Located within the Transgenic Insert

[0120] During the transformation process it is often necessary to include ancillary sequences, such as selectable marker or reporter genes, for tracking the presence or absence of a desired trait gene transformed into the plant on the DNA construct. Such ancillary sequences often do not contribute to the desired trait or characteristic conferred by the phenotypic trait gene. Homologous recombination is a method by which introduced sequences may be selectively deleted in transgenic plants.

[0121] Deletion of sequences by homologous recombination relies upon directly repeated DNA sequences positioned about the region to be excised, so that the repeated DNA sequences direct excision utilizing native cellular recombination mechanisms. The first fertile transgenic plants are crossed to produce either hybrid or inbred progeny plants, and from those progeny plants, one or more second fertile transgenic plants are selected that contain a second DNA sequence that has been altered by recombination, preferably resulting in the deletion of the ancillary sequence. The first fertile plant can be either hemizygous or homozygous for the DNA sequence containing the directly repeated DNA that will drive the recombination event as disclosed in U.S. application Ser. No. 09/521,557, incorporated herein by reference.

[0122] Detecting Polymorphisms

[0123] Polymorphisms in DNA sequences can be detected by a variety of effective methods well known in the art including those methods disclosed in U.S. Pat. Nos. 5,468,613 and 5,217,863 by hybridization to allele-specific oligonucleotides; in U.S. Pat. Nos. 5,468,613 and 5,800,944 by probe ligation; in U.S. Pat. No. 5,616,464 by probe linking; and in U.S. Pat. Nos. 6,004,744; 6,013,431; 5,595,890; 5,762,876; and 5,945,283 by labeled base extension, all of which are incorporated herein by reference.

[0124] In another preferred method for detecting polymorphisms, SNPs and Indels can be detected by methods disclosed in U.S. Pat. Nos. 5,210,015; 5,876,930; and 6,030,787 in which an oligonucleotide probe having a 5′fluorescent reporter dye and a 3′quencher dye covalently linked to the 5′ and 3′ ends of the probe. When the probe is intact, the proximity of the reporter dye to the quencher dye results in the suppression of the reporter fluorescence, e.g., by Forster-type energy transfer. A PCR reaction is designed such that forward and reverse primers hybridize to specific sequences of the target DNA flanking a polymorphism. The hybridization probe hybridizes to polymorphism-containing sequence within the amplified PCR product. In the subsequent PCR cycle, DNA polymerase with 5′→3′ exonuclease activity cleaves the probe and separates the reporter dye from the quencher dye resulting in increased fluorescence of the reporter. A useful assay is available from AB Biosystems as the Taqman® assay, which employs four synthetic oligonucleotides in a single reaction that concurrently amplifies the maize genomic DNA, discriminates between the alleles present, and directly provides a signal for discrimination and detection. Two of the four oligonucleotides serve as PCR primers and generate a PCR product encompassing the polymorphism to be detected. Two others are allele-specific fluorescence-resonance-energy-transfer (FRET) probes. FRET probes incorporate a fluorophore and a quencher molecule in close proximity so that the fluorescence of the fluorophore is quenched. The signal from a FRET probe is generated by degradation of the FRET oligonucleotide, so that the fluorophore is released from proximity to the quencher, and is thus able to emit light when excited at an appropriate wavelength. In the assay, two FRET probes bearing different fluorescent reporter dyes are used, where a unique dye is incorporated into an oligonucleotide that can anneal with high specificity to only one of the two alleles. Useful reporter dyes include 6-carboxy-4,7,2′,7′-tetrachlorofluorecein (TET), VIC (a dye from Applied Biosystems Foster City, Calif.), and 6-carboxyfluorescein phosphoramidite (FAM). A useful quencher is 6-carboxy-N,N,N′,N′-tetramethylrhodamine (TAMRA). Additionally, the 3′end of each FRET probe is chemically blocked so that it cannot act as a PCR primer. During the assay, maize genomic DNA is added to a buffer containing the two PCR primers and two FRET probes. Also present is a third fluorophore used as a passive reference, e.g., rhodamine X (ROX), to aid in later normalization of the relevant fluorescence values (correcting for volumetric errors in reaction assembly). Amplification of the genomic DNA is initiated. During each cycle of the PCR, the FRET probes anneal in an allele-specific manner to the template DNA molecules. Annealed (but not non-annealed) FRET probes are degraded by TAQ DNA polymerase as the enzyme encounters the 5′ end of the annealed probe, thus releasing the fluorophore from proximity to its quencher. Following the PCR reaction, the fluorescence of each of the two fluorescers, as well as that of the passive reference, is determined fluorometrically. The normalized intensity of fluorescence for each of the two dyes will be proportional to the amounts of each allele initially present in the sample, and thus the genotype of the sample can be inferred.

[0125] To design primers and probes for the assay the locus sequence is first masked to prevent design of any of the three primers to sites that match known maize repetitive elements (e.g., transposons) or are of very low sequence complexity (di- or tri-nucleotide repeat sequences). Design of primers to such repetitive elements will result in assays of low specificity, through amplification of multiple loci or annealing of the FRET probes to multiple sites.

[0126] PCR primers are designed (a) to have a length in the size range of 18 to 25 bases and matching sequences in the polymorphic locus, (b) to have a calculated melting temperature in the range of 57° C. to 60° C., e.g., corresponding to an optimal PCR annealing temperature of 52° C. to 55° C., (c) to produce a product that includes the polymorphic site and has a length in the size range of 75 to 250 base pairs. The PCR primers are preferably located on the locus so that the polymorphic site is at least one base away from the 3′ end of each PCR primer. The PCR primers must not contain regions that are extensively self- or inter-complementary.

[0127] FRET probes are designed to span the sequence of the polymorphic site, preferably with the polymorphism located in the 3′ most ⅔ of the oligonucleotide. In the preferred embodiment, the FRET probes will have incorporated at their 3′end a chemical moiety that, when the probe is annealed to the template DNA, binds to the minor groove of the DNA, thus enhancing the stability of the probe-template complex. The probes should have a length in the range of 12 to 17 bases and, with the 3′MGB, have a calculated melting temperature of 5° C. to 7° C. above that of the PCR primers. Probe design is disclosed in U.S. Pat. Nos. 5,538,848; 6,084,102; and 6,127,121.

[0128] Use of Polymorphisms to Establish Marker/Trait Associations

[0129] The polymorphisms in the loci of this invention can be used in marker/trait associations that are inferred from statistical analysis of genotypes and phenotypes of the members of a population. These members may be individual organisms of, e.g., maize, families of closely related individuals, inbred lines, dihaploids or other groups of closely related individuals. Such maize groups are referred to as “lines”, indicating line of descent. The population may be descended from a single cross between two individuals or two lines (e.g., a mapping population) or it may consist of individuals with many lines of descent. Each individual or line is characterized by a single or average trait phenotype and by the genotypes at one or more marker loci.

[0130] Several types of statistical analysis can be used to infer marker/trait association from the phenotype/genotype data, but a basic idea is to detect markers, i.e., polymorphisms, for which alternative genotypes have significantly different average phenotypes. For example, if a given marker locus A has three alternative genotypes (AA, Aa and aa), and if those three classes of individuals have significantly different phenotypes, then one infers that locus A is associated with the trait. The significance of differences in phenotype may be tested by several types of standard statistical tests such as linear regression of marker genotypes on phenotype or analysis of variance (ANOVA). Commercially available, statistical software packages commonly used to do this type of analysis include SAS Enterprise Miner (SAS Institute Inc., Cary, N.C.) and Splus (Insightful Corporation. Cambridge, Mass.).

[0131] Often the goal of an association study is not simply to detect marker/trait associations, but to estimate the location of genes affecting the trait directly (i.e., QTLs) relative to the marker locations. In a simple approach to this goal, one makes a comparison among marker loci of the magnitude of difference among alternative genotypes or the level of significance of that difference. Trait genes are inferred to be located nearest the marker(s) that have the greatest associated genotypic difference. In a more complex analysis, such as interval mapping (Lander and Botstein, Genetics 121:185-199, 1989), each of many positions along the genetic map (say at 1 cM intervals) is tested for the likelihood that a QTL is located at that position. The genotype/phenotype data are used to calculate for each test position a LOD score (log of likelihood ratio). When the LOD score exceeds a critical threshold value, there is significant evidence for the location of a QTL at that position on the genetic map (which will fall between two particular marker loci).

[0132] 1. Linkage Disequilibrium Mapping and Association Studies

[0133] Another approach to determining trait gene location is to analyze trait-marker associations in a population within which individuals differ at both trait and marker loci. Certain marker alleles may be associated with certain trait locus alleles in this population due to population genetic process such as the unique origin of mutations, founder events, random drift and population structure. This association is referred to as linkage disequilibrium. In linkage disequilibrium mapping, one compares the trait values of individuals with different genotypes at a marker locus. Typically, a significant trait difference indicates close proximity between marker locus and one or more trait loci. If the marker density is appropriately high and the linkage disequilibrium occurs only between very closely linked sites on a chromosome, the location of trait loci can be very precise.

[0134] A specific type of linkage disequilibrium mapping is known as association studies. This approach makes use of markers within candidate genes, which are genes that are thought to be functionally involved in development of the trait because of information such as biochemistry, physiology, transcriptional profiling and reverse genetic experiments in model organisms. In association studies, markers within candidate genes are tested for association with trait variation. If linkage disequilibrium in the study population is restricted to very closely linked sites (i.e., within a gene or between adjacent genes), a positive association provides nearly conclusive evidence that the candidate gene is a trait gene.

[0135] 2. Positional Cloning and Transgenic Applications

[0136] Traditional linkage mapping typically localizes a trait gene to an interval between two genetic markers (referred to as flanking markers). When this interval is relatively small (say less than 1 Mb), it becomes feasible to precisely identify the trait gene by a positional cloning procedure. A high marker density is required to narrow down the interval length sufficiently. This procedure requires a library of large insert genomic clones (such as a BAC library), where the inserts are pieces (usually 100-150 kb in length) of genomic DNA from the species of interest. The library is screened by probe hybridization or PCR to identify clones that contain the flanking marker sequences. Then a series of partially overlapping clones that connects the two flanking clones (a “contig”) is built up through physical mapping procedures. These procedures include fingerprinting, STS content mapping and sequence-tagged connector methodologies. Once the physical contig is constructed and sequenced, the sequence is searched for all transcriptional units. The transcriptional unit that corresponds to the trait gene can be determined by comparing sequences between mutant and wild type strains, by additional fine-scale genetic mapping, and/or by functional testing through plant transformation. Trait genes identified in this way become leads for transgenic product development. Similarly, trait genes identified by association studies with candidate genes become leads for transgenic product development.

[0137] 3. Marker-Aided Breeding and Marker-Assisted Selection

[0138] When a trait gene has been localized in the vicinity of genetic markers, those markers can be used to select for improved values of the trait without the need for phenotypic analysis at each cycle of selection. In marker-aided breeding and marker-assisted selection, associations between trait genes and markers are established initially through genetic mapping analysis (as in sections 1 or 2 above). In the same process, one determines which marker alleles are linked to favorable trait gene alleles. Subsequently, marker alleles associated with favorable trait gene alleles are selected in the population. This procedure will improve the value of the trait provided that there is sufficiently close linkage between markers and trait genes. The degree of linkage required depends upon the number of generations of selection because, at each generation, there is opportunity for breakdown of the association through recombination.

[0139] 4. Prediction of Crosses for New Inbred Line Development

[0140] The associations between specific marker alleles and favorable trait gene alleles also can be used to predict what types of progeny may segregate from a given cross. This prediction may allow selection of appropriate parents to generation populations from which new combinations of favorable trait gene alleles are assembled to produce a new inbred line. For example, if line A has marker alleles previously known to be associated with favorable trait alleles at loci 1, 20 and 31, while line B has marker alleles associated with favorable effects at loci 15, 27 and 29, then a new line could be developed by crossing A×B and selecting progeny that have favorable alleles at all 6 trait loci.

[0141] 5. Hybrid Prediction

[0142] Commercial corn seed is produced by making hybrids between two elite inbred lines that belong to different “heterotic groups”. These groups are sufficiently distinct genetically that hybrids between them show high levels of heterosis or hybrid vigor (i.e., increased performance relative to the parental lines). By analyzing the marker constitution of good hybrids, one can identify sets of alleles at different loci in both male and female lines that combine well to produce heterosis. Understanding these patterns, and knowing the marker constitution of different inbred lines, can allow prediction of the level of heterosis between different pairs of lines. These predictions can narrow down the possibilities of which line(s) of opposite heterotic group should be used to test the performance of a new inbred line.

[0143] 6. Identity by Descent

[0144] One theory of heterosis predicts that regions of identity by descent (IBD) between the male and female lines used to produce a hybrid will reduce hybrid performance. Identity by descent can be inferred from patterns of marker alleles in different lines. An identical string of markers at a series of adjacent loci may be considered identical by descent if it is unlikely to occur independently by chance. Analysis of marker fingerprints in male and female lines can identify regions of IBD. Knowledge of these regions can inform the choice of hybrid parents, because avoiding IBD in hybrids is likely to improve performance. This knowledge may also inform breeding programs in that crosses could be designed to produce pairs of inbred lines (one male and one female) that show little or no IBD.

[0145] A fingerprint of an inbred line is the combination of alleles at a set of marker loci. High density fingerprints can be used to establish and trace the identity of germplasm, which has utility in germplasm ownership protection.

[0146] Genetic markers are used to accelerate introgression of transgenes into new genetic backgrounds (i.e., into a diverse range of germplasm). Simple introgression involves crossing a transgenic line to an elite inbred line and then backcrossing the hybrid repeatedly to the elite (recurrent) parent, while selecting for maintenance of the transgene. Over multiple backcross generations, the genetic background of the original transgenic line is replaced gradually by the genetic background of the elite inbred through recombination and segregation. This process can be accelerated by selection on marker alleles that derive from the recurrent parent.

[0147] Use of Polymorphism Assay for Mapping a Library of DNA Clones

[0148] The polymorphisms and loci of this invention are useful for identifying and mapping DNA sequence of QTLs and genes linked to the polymorphisms. For instance, BAC or YAC clone libraries can be queried using polymorphisms linked to a trait to find a clone containing specific QTLs and genes associated with the trait. For instance, QTLs and genes in a plurality, e.g., hundreds or thousands, of large, multi-gene sequences can be identified by hybridization with an oligonucleotide probe that hybridizes to a mapped and/or linked polymorphism. Such hybridization screening can be improved by providing clone sequence in a high density array. The screening method is more preferably enhanced by employing a pooling strategy to significantly reduce the number of hybridizations required to identify a clone containing the polymorphism. When the polymorphisms are mapped, the screening effectively maps the clones.

[0149] For instance, in a case where thousands of clones are arranged in a defined array, e.g., in 96-well plates, the plates can be arbitrarily arranged in three-dimensionally, arrayed stacks of wells each comprising a unique DNA clone. The wells in each stack can be represented as discrete elements in a three dimensional array of rows, columns and plates. In one aspect of the invention the number of stacks and plates in a stack are about equal to minimize the number of assays. The stacks of plates allow the construction of pools of cloned DNA.

[0150] For a three-dimensionally arrayed stack, pools of cloned DNA can be created for (a) all of the elements in each row, (b) all of the elements of each column, and (c) all of the elements of each plate. Hybridization screening of the pools with an oligonucleotide probe that hybridizes to a polymorphism unique to one of the clones will provide a positive indication for one column pool, one row pool and one plate pool, thereby indicating the well element containing the target clone.

[0151] In the case of multiple stacks, additional pools of all of the clone DNA in each stack allows indication of the stack having the row-column-plate coordinates of the target clone. For instance, a 4608 clone set can be disposed in 48 96-well plates. The 48 plates can be arranged in 8 sets of 6-plate stacks providing 6×12×8 three-dimensional arrays of elements, i.e., each stack comprises 6 stacks of 8 rows and 12 columns. For the entire clone set there are 36 pools, i.e., 6 stack pools, 8 row pools, 12 column pools and 8 stack pools. Thus, a maximum of 36 hybridization reactions is required to find the clone harboring QTLs or genes associated or linked to each mapped polymorphism.

[0152] Once a clone is identified, genes within that clone can be tested for whether they affect the trait by analysis of recombinants in a mapping population, further linkage disequilibrium analysis, and ultimately transgenic testing. Additional genes can be identified by finding additional clones overlapping the one containing the original polymorphism through contig building, as described above.

[0153] Breeding Plants of the Invention

[0154] In addition to direct transformation of a particular plant genotype with a construct prepared according to the current invention, transgenic plants may be made by crossing a plant having a construct of the invention to a second plant lacking the construct. For example, a selected coding region operably linked to a promoter can be introduced into a particular plant variety by crossing, without the need for ever directly transforming a plant of that given variety. Therefore, the current invention not only encompasses a plant directly regenerated from cells that have been transformed in accordance with the current invention, but also the progeny of such plants. As used herein the term “progeny” denotes the offspring of any generation of a parent plant prepared in accordance with the instant invention, wherein the progeny comprises a construct prepared in accordance with the invention. “Crossing” a plant to provide a plant line having one or more added transgenes relative to a starting plant line, as disclosed herein, is defined as the techniques that result in a transgene of the invention being introduced into a plant line by crossing a starting line with a donor plant line that comprises a transgene of the invention. To achieve this one could, for example, perform the following steps:
[0155] (a) plant seeds of the first (starting line) and second (donor plant line that comprises a transgene of the invention) parent plants;
[0156] (b) grow the seeds of the first and second parent plants into plants that bear flowers;
[0157] (c) pollinate a flower from the first parent plant with pollen from the second parent plant; and
[0158] (d) harvest seeds produced on the parent plant bearing the fertilized flower.
   Backcrossing is herein defined as the process including the steps of:
[0159] (a) crossing a plant of a first genotype containing a desired gene, DNA sequence or element to a plant of a second genotype lacking the desired gene, DNA sequence or element;
[0160] (b) selecting one or more progeny plants containing the desired gene, DNA sequence or element;
[0161] (c) crossing the progeny plant to a plant of the second genotype; and
[0162] (d) repeating steps (b) and (c) for the purpose of transferring the desired gene, DNA sequence or element from a plant of a first genotype to a plant of a second genotype.

[0163] Plant Breeding

[0164] Introgression of a DNA element into a plant genotype is defined as the result of the process of backcross conversion. A plant genotype into which a DNA sequence has been introgressed may be referred to as a backcross converted genotype, line, inbred, or hybrid. Similarly a plant genotype lacking the desired DNA sequence may be referred to as an unconverted genotype, line, inbred, or hybrid.

[0165] Backcrossing can be used to improve a starting plant. Backcrossing transfers a specific desirable trait from one source to an inbred or other plant that lacks that trait. This can be accomplished, for example, by first crossing a superior inbred (A) (recurrent parent) to a donor inbred (non-recurrent parent), which carries the appropriate gene(s) for the trait in question, for example, a construct prepared in accordance with the current invention. The progeny of this cross first are selected in the resultant progeny for the desired trait to be transferred from the non-recurrent parent, then the selected progeny are mated back to the superior recurrent parent (A). After five or more backcross generations with selection for the desired trait, the progeny are hemizygous for loci controlling the characteristic being transferred but are like the superior parent for most or almost all other genes. The last backcross generation would be selfed to give progeny that are pure breeding for the gene(s) being transferred, i.e., one or more transformation events.

[0166] Therefore, through a series a breeding manipulations, a selected transgene may be moved from one line into an entirely different line without the need for further recombinant manipulation. Transgenes are valuable in that they typically behave genetically as any other gene and can be manipulated by breeding techniques in a manner identical to any other corn gene. Therefore, one may produce inbred plants that are true breeding for one or more transgenes. By crossing different inbred plants, one may produce a large number of different hybrids with different combinations of transgenes. In this way, plants may be produced that have the desirable agronomic properties frequently associated with hybrids (“hybrid vigor”), as well as the desirable characteristics imparted by one or more transgene(s).

[0167] It is desirable to introgress the genes of the present invention into maize hybrids for characterization of the phenotype conferred by each gene in a transformed plant. The host genotype into which the transgene was introduced, preferably LH59, is an elite inbred and therefore only limited breeding is necessary in order to produce high yielding maize hybrids. The transformed plant, regenerated from callus is crossed, to the same genotype, e.g., LH59. The progeny are self-pollinated twice, and plants homozygous for the transgene are identified. Homozygous transgenic plants are crossed to a testcross parent in order to produce hybrids. The test cross parent is an inbred belonging to a heterotic group that is different from that of the transgenic parent and for which it is known that high yielding hybrids can be generated, for example hybrids are produced from crosses of LH59 to either LH195 or LH200.

[0168] The following examples illustrate the identification of polymorphic markers useful for mapping and isolating genes of this invention and as markers of QTLs and genes associated with an oil-related trait. Other examples illustrate the identification of oil-related genes and partial genes. Still other examples illustrate methods for inserting genes of this invention into a plant expression vector, i.e., operably linked to a promoter and other regulatory elements, to confer an oil-related trait to a transgenic plant.

### EXAMPLE 1

[0169] This example illustrates the identification of oil-associated genes and maize oil markers.

a. Candidate Oil Genes

[0170] A set of more than 800 candidate oil genes was identified (a) as homologs of plant genes that are believed to be in an oil-related metabolic pathway of a model plant such as Arabidopsis thaliana; (b) by comparing transcription profiling results for high oil and low oil maize lines; and (c) by subtractive hybridization between endosperm tissues of high oil and low oil maize lines. The sequences of the candidate oil genes were queried against a proprietary collection of maize genes and partial maize genes, e.g., genomic sequence or ESTs, to identify a set of more than 800 candidate maize oil genes.

b. Maize Polymorphisms

[0171] Maize polymorphisms were identified by comparing alignments of DNA sequences from separate maize lines. Candidate polymorphisms were qualified by the following parameters:
[0172] (a) The minimum length of sequence for a synthetic reference sequence is 200 bases.
[0173] (b) The percentage identity of observed bases in a region of 15 bases on each side of a candidate SNP, is 75%.
[0174] (c) The minimum phred quality in each of the various sequences at a polymorphism site is 35.
[0175] (d) The minimum phred quality in a region of 15 bases on each side of the polymorphism site is 20.
   c. Oil Informative Markers

[0176] The SNP and Indel polymorphisms in each locus were qualified for detection by development of an assay, e.g., Taqman® assay (Applied Biosystems, Foster City, Calif.). Assay qualified polymorphisms are evaluated for oil informativeness by comparing allelic frequencies in the two parental lines of an association study population. The parent lines were representatives of an oil rich maize population and an oil poor maize population, i.e., the University of Illinois High Oil and Low Oil maize lines as described by Dudley and Lambert (1992, Maydica 37: 81-87). Informativeness is reported as an allelic frequency difference between parental populations, i.e. the high oil line and the low oil line. When one of the parents, e.g., the high oil line, is fixed, its allelic frequency is 1. Markers were qualified if they had an allelic frequency difference of at least 0.6. If the marker was fixed in either parent with a frequency of 0 or 1, a marker could be selected at a lower allelic frequency difference of at least 0.4. The informative markers were viewed on a genetic map to identify marker-deficient regions of chromosomes. Markers with lower allelic frequency difference, e.g., as low as 0.15, were selected to fill in the marker-deficient regions of chromosomes. A set of informative markers were used in a marker-trait association study to verify oil-associated genes from the set of candidate oil genes.

d. Labeled Probe Degradation Assay for SNP Detection

[0177] A quantity of maize genomic template DNA (e.g., about 2-20 ng) is mixed in 5 μL total volume with four oligonucleotides, which can be designed by Applied Biosystems, i.e., a forward primer, a reverse primer, a hybridization probe having a VIC reporter attached to the 5′ end, and a hybridization probe having a FAM reporter attached to the 5′end as well as PCR reaction buffer containing the passive reference dye ROX. The PCR reaction is conducted for 35 cycles using a 60° C. annealing-extension temperature. Following the reaction, the fluorescence of each fluorophore as well as that of the passive reference is determined in a fluorimeter. The fluorescence value for each fluorophore is normalized to the fluorescence value of the passive reference. The normalized values are plotted against each other for each sample. The data points should fall into clearly separable clusters.

[0178] To confirm that an assay produces accurate results, each new assay is performed on a number of replicates of samples of known genotypic identity representing each of the three possible genotypes, i.e., two homozygous alleles and a heterozygous sample. To be a valid and useful assay, it must produce clearly separable clusters of data points, such that one of the three genotypes can be assigned for at least 90% of the data points, and the assignment is observed to be correct for at least 98% of the data points. Subsequent to this validation step, the assay is applied to progeny of a cross between two highly inbred individuals to obtain segregation data, which are then used to calculate a genetic map position for the polymorphic locus.

e. Marker Mapping

[0179] The maize markers were genetically mapped based on the genotypes of certain SNPs. The genotypes were combined with genotypes for public core SSR and RFLP markers scored on recombinant inbred lines. Before mapping, any loci showing distorted segregation (P<0.01 for a Chi-square test of a 1:1 segregation ratio) were removed. These loci could be added to the map later but without allowing them to change marker order.

[0180] A map was constructed using the JoinMap version 2.0 software, which is described by Stam (“Construction of integrated genetic linkage maps by means of a new computer package: JoinMap, The Plant Journal, 3: 739-744 (1993); Stam, P. and van Ooijen, J. W. “JoinMap version 2.0: Software for the calculation of genetic linkage maps (1995) CPRO-DLO, Wageningen). JoinMap implements a weighted-least squares approach to multipoint mapping in which information from all pairs of linked loci (adjacent or not) is incorporated. Linkage groups were formed using a LOD threshold of 5.0. The SSR and RFLP public markers were used to assign linkage groups to chromosomes. Linkage groups were merged within chromosomes before map construction.

[0181] Haldane's mapping function was used to convert recombination fractions to map distances. Lenient criteria was applied for excluding pairwise linkage data; only data with a LOD not greater than 0.001 or a recombination fraction not less than 0.499 are excluded. Parameters for ordering loci were a jump threshold of 5.0, a triplet threshold of 7.0 and a ripple value of 3. About 38% of the loci were ordered in two rounds of map construction with a jump threshold of 5.0, which prevents the addition of a locus to the map if such addition results in a jump of more than 5.0 to a goodness-of-fit criterion. The remaining loci were added to the map without application of such a jump threshold. Addition of these loci had a negligible effect on the map order and distances for the initial loci. Mapped SNP polymorphisms are identified in Table 6.

f. Marker Trait Association

[0182] The informative maize markers were used in an association study to identify which of the candidate genes were more significantly associated with oil level in corn (Zea mays).

[0183] The University of Illinois has corn lines differing in seed oil that have been developed by long-term selection. A high oil line (IHO) produces about 18% seed oil and a low oil line (ILO) produces about 1.5% seed oil. The IHO and ILO lines are available from the University of Illinois for research. A random mated population (RMn) was produced from random mating offspring of a cross between IHO and ILO by chain crossing for 10 generations to produce an RM10 population. From the RM10 population 504 S1-derived lines were developed by selfing and these lines constitute an association study population. This population along with 72 control samples were genotyped using oil informative SNPs.

[0184] Phenotypes were measured on 504 association population lines in replicated field trials with an alpha(0,1) incomplete block design. The field trials comprised the 504 lines grown in each of two years at each of 3 locations with 2 replicates per location. The lines were blocked within each replicate. These field trials were performed on the 504 RM10:S1 lines, per se, and on hybrids made by crossing each line to a tester line, i.e., line (7051), but detailed marker genotyping information was obtained for only 499 of the lines.

Analysis of Variance

[0185] One approach to detecting marker-trait associations is to do analysis of variance (ANOVA) of each marker separately (i.e. single marker ANOVA with a model of trait=marker−x). When 488 markers were analyzed in this way for both per se and hybrid data, 186 markers were identified as having a significant effect on oil % at the alpha=0.05 level. See prior U.S. application Ser. No. 10/389,566.

Multiple Regression Analysis

[0186] An alternative statistical approach is to use multiple regression to determine which of a set of markers are simultaneously significantly associated with a trait of interest. First, it was established that a simple additive model is appropriate for these data. An analysis of variance of the raw observations was used to estimate variance components for environment (location×year combination), genotype (RM10:S1 line) and the genotype×environment interaction. The genotype×environment interaction variance component is < 1/0th the component for genotype. Similarly, ANOVAs of the line means show little or no dominance. In 488 tests of dominance (one per marker), only 27 have a p-value <0.05, which is close to the number expected by chance (24). All pairwise interactions between markers were tested also and we observed just 5.7% of the tests significant at the 5% level. Therefore, in subsequent analyses the genotypes were coded as −1, 0, 1 (for AA, Aa, aa) and multiple regression models without interaction terms were used.

[0187] One reason for using a multiple regression approach is that it is expected to be more sensitive in detecting trait effects in the presence of multiple QTLs. The reason is that, with single marker regression, nearly all the variance is in the error term. With multiple regression, if some of the markers account for variation in the trait, that variation is removed from the error term, thus providing greater statistical power. Of two new multiple regression methods that were evaluated along with single marker ANOVA, stepwise multiple regression was found to perform best in simulations. For details of the simulation results, see Laurie et al, in preparation.

[0188] Stepwise multiple regression was done with the “maxr” option of “PROC REG” of SAS software. “The MAXR method begins by finding the one-variable model producing the highest R². Then another variable, the one that yields the greatest increase in R², is added. Once the two-variable model is obtained, each of the variables in the model is compared to each variable not in the model. For each comparison, the MAXR method determines if removing one variable and replacing it with the other variable increases R². After comparing all possible switches, the MAXR method makes the switch that produces the largest increase in R². Comparisons begin again, and the process continues until the MAXR method finds that no switch could increase R². Thus, the two-variable model achieved is considered the “best” two-variable model the technique can find. Another variable is then added to the model, and the comparing-and-switching process is repeated to find the “best” three-variable model, and so forth. “(SAS Online Documentation, 1999 SAS Institute, Inc., Version 8). The “best” model (in terms of maximizing R²) was identified by MAXR for each model size in the range of 1 to 120 markers.

[0189] The “best” subset size was selected by minimizing a criterion that is equivalent to maximum likelihood with a penalty on model complexity. In general, the criterion=−2 log likelihood of the model−pk, where p is the number of parameters in the model (the number of markers plus one for the intercept) and k is a penalty factor. The Schwarz Bayesian Criterion (BIC, Rawlings, J. O., S. G. Pantula and D. A. Dickey, 1998, Applied Regression Analysis. Springer-Verlag, New York.) was used, for which k=ln(n), in this case, ln(499)=6.2). The “best” model dimension is taken as the minimum value of SBC, evaluated from 1 to 120 regressors.

[0190] Analyzing the RM10:S1 per se data by maxr/bic, 50 markers are selected. One disadvantage of the maxr/bic procedure is that it is difficult to assess statistical significance in a rigorous way. Although one gets probability values from tests of the partial regression coefficients, those values are not easily interpreted because the data were used to select markers that maximize the R² of regression. The p-values of the single-marker regressions are straightforward probabilities. If the 50 markers having lowest single marker p-values are selected, the greatest p-value is 0.0097. Since these markers are highly significant and the simulations show that maxr/bic essentially always does better than single marker regressions, it is assumed that the maxr/bic selected markers are at least as “significant” as those selected by single marker regression. Analyzing the hybrid data by maxr/bic, 39 markers are selected. If the 39 markers with lowest p-values of single marker regression from hybrids are selected, the largest p-value in the set is 0.0029.

[0191] There are 73 markers that are selected in either the per se and/or hybrid data sets (16 of these are selected in both). These 73 markers are significantly associated with oil in maize, which means it is very likely that they either directly cause variation in oil or they are closely linked to QTL that cause such variation. These 73 significant markers which are very likely to either reside within an oil gene or to be closely linked to an oil gene are in the 73 polymorphic loci of SEQ ID NO: 1 through SEQ ID NO:73 and identified more particularly in Table 1. A set of 73 of the candidate genes having sequence that overlaps with any one or more of the 73 genomic amplicons of SEQ ID NO:1 through SEQ ID NO:73 were identified and designated as oil-associated genes and are identified as having a cDNA sequence of SEQ ID NO:74 through SEQ ID NO:146. Because these oil-associated genes contain or are associated by linkage disequilibrium to a statistically significant maize oil marker, these oil-associated genes are most likely to be oil genes.

[0192] Tables 1-5 provides a description of 73 genomic amplicons defining polymorphic loci of the maize oil markers of this invention, 73 oil-associated genes and the cognate proteins and homologous proteins. These particular aspects of the invention are identified by:

[0193] “seq_num”, which refers to the sequence number of the nucleic acid sequence or amino acid sequence, e.g., a SEQ ID NO.; and

[0194] “seq_id”, which refers to an arbitrary identifying name for an amplicon, e.g. “Amplicon nnn”, for an oil-associated gene, e.g., “MRT4577_nnnnC”, for a cognate protein of an oil-associated gene, e.g. “MRT4577_nnnnP”, of for a cognate protein of a homolog to an oil-associated gene, e.g. “MRT4577_nnnnP” or a name from a database such as GenBank, e.g. “gi:6539874”.

[0195] “organism_name” which refers to the source organism for the gene or protein.

More particularly, the maize oil markers in the 73 genomic amplicons are described by:

[0196] MUTATION_ID, which refers to one or more arbitrary identifying names for each polymorphism;

[0197] START_POS which refers to the position in the nucleotide sequence of the polymorphic maize DNA locus where the polymorphism begins;

[0198] END_POS which refers to the position in the nucleotide sequence of the polymorphic maize DNA locus where the polymorphism ends; for SNPs the START_POS and END_POS are common;

[0199] TYPE which refers to the identification of the polymorphism as an SNP or IND (Indel);

[0200] ALLELEn and STRAINn which refer to the nucleotide sequence of a polymorphism in a specific allelic maize variety; and

[0201] GENE_ID refers to the SEQ_ID of the oil-associated gene identified later in Table 1.

More particularly, the oil-associated genes and their cognate proteins are described by:

[0202] DESCRIPTION, which refers to a functional description of an oil-associated gene, e.g., “gene encoding MRT4577_nnnnP” or a functional description of a cognate protein, e.g., a GenBank annotation or “long ORF” indicating no known protein function for an amino acid sequence that is translated from a longest available ORF.

[0203] Table 6 provides genetic map positions of maize oil markers and linked oil-associated genes; a description of the probability of significance of the marker/trait association (as determined from per se or hybrid association analysis for the marker); and the identification and sequence number of the oil-associated gene and their translated proteins. More particularly, Table 6 identifies maize oil markers, oil-associated genes and proteins by:

[0204] “Map Position” which identifies the distance measured in cM from the 5′ end of a maize chromosome for the SNP identified by “Mutation ID”, which refers to an arbitrary identifying name for each polymorphism;

[0205] Seq Num, which refers to the sequence number of a genomic amplicon containing the maize oil marker;

[0206] Protein Seq Num, which refers to the sequence number of the amino acid sequence, e.g., a SEQ ID NO, for the cognate protein encoded by a linked oil-associated gene.

TABLE 6

| Map Position | Mutation ID | Seq Num | Protein Seq Num |
|---|---|---|---|
| 1-30.4 | 144506 | 67 | 213 |
| 1-44 | 104827 | 55 | 201 |
| 1-46.8 | 37716 | 35 | 181 |
| 1-60.6 | 40189 | 38 | 184 |
| 1-85.9 | 69188 | 50 | 196 |
| 1-86.3 | 36286 | 32 | 178 |
| 1-99 | 107077 | 58 | 204 |
| 1-124.6 | 33373 | 27 | 173 |
| 1-129.5 | 9626 | 5 | 151 |
| 1-132.1 | 34903 | 28 | 174 |
| 1-178.6 | 151382 | 73 | 219 |
| 2-5.8 | 31064 | 22 | 168 |
| 2-19.5 | 82235 | 53 | 199 |
| 2-35.9 | 13691 | 9 | 155 |
| 2-92.5 | 551 | 1 | 147 |
| 2-114.9 | 22775 | 16 | 162 |
| 2-127 | 41850 | 40 | 186 |
| 2-152.4 | 43579 | 43 | 189 |
| 3-9.1 | 10667 | 7 | 153 |
| 3-19.7 | 32137 | 25 | 171 |
| 3-58.6 | 29867 | 21 | 167 |
| 3-59.3 | 21190 | 14 | 160 |
| 3-61.7 | 32247 | 26 | 172 |
| 3-62.7 | 9739 | 6 | 152 |
| 3-111.4 | 110780 | 62 | 208 |
| 4-38.7 | 110069 | 61 | 207 |
| 4-80 | 106845 | 57 | 203 |
| 4-108.2 | 39511 | 37 | 183 |
| 4-109.2 | 23289 | 18 | 164 |
| 4-110.3 | 8979 | 4 | 150 |
| 4-119.2 | 18439 | 13 | 159 |
| 4-128.1 | 32049 | 24 | 170 |
| 4-135.8 | 17900 | 12 | 158 |
| 4-144.8 | 35338 | 29 | 175 |
| 5-39.9 | 109403 | 60 | 206 |
| 5-57.7 | 52081 | 45 | 191 |
| 5-62.3 | 51419 | 44 | 190 |
| 5-66.9 | 146415 | 71 | 217 |
| 5-69.6 | 144731 | 68 | 214 |
| 5-76.4 | 29820 | 20 | 166 |
| 5-80.9 | 143418 | 66 | 212 |
| 5-83 | 104850 | 56 | 202 |
| 5-100.9 | 35377 | 30 | 176 |
| 5-104.5 | 58375 | 46 | 192 |
| 6-52.8 | 4463 | 2 | 148 |
| 6-53.1 | 60751 | 49 | 195 |
| 6-58.1 | 59008 | 48 | 194 |
| 6-61.5 | 148039 | 72 | 218 |
| 6-67.5 | 14694 | 11 | 157 |
| 6-110.4 | 31684 | 23 | 169 |
| 6-121 | 37634 | 34 | 180 |
| 7-62 | 42164 | 41 | 187 |
| 7-72.8 | 42930 | 42 | 188 |
| 7-99.8 | 35408 | 31 | 177 |
| 7-107.5 | 38914 | 36 | 182 |
| 7-122.2 | 145260 | 70 | 216 |
| 7-124.5 | 15184 | 10 | 156 |
| 7-186.5 | 36490 | 33 | 179 |
| 8-16.4 | 40320 | 39 | 185 |
| 8-40.9 | 107937 | 59 | 205 |
| 8-53.9 | 145200 | 69 | 215 |
| 8-55.7 | 23091 | 17 | 163 |
| 8-59.3 | 77568 | 51 | 197 |
| 8-65.8 | 104389 | 54 | 200 |
| 8-106.8 | 13100 | 8 | 154 |
| 9-20.5 | 58904 | 47 | 193 |
| 9-94.6 | 112139 | 64 | 210 |
| 9-110.3 | 8937 | 3 | 149 |
| 9-110.3 | 78438 | 52 | 198 |
| 9-165.8 | 110886 | 63 | 209 |
| 10-50.5 | 143408 | 65 | 211 |
| 10-56.7 | 22717 | 15 | 161 |
| 10-73.6 | 27447 | 19 | 165 |

### EXAMPLE 2

[0207] This example illustrates transgenic corn with altered oil level using recombinant DNA from an oil-associated gene.

[0208] GATEWAY™ destination vectors (available from Invitrogen Life Technologies, Carlsbad, Calif.) are constructed for insertion of recombinant DNA from oil-associated genes for corn transformation. The elements of each destination vector are summarized in Table 7 below and include a selectable marker transcription region and a DNA insertion transcription region. The selectable marker transcription region comprises a Cauliflower Mosaic Virus 35S promoter operably linked to a gene encoding neomycin phosphotransferase II (nptII) followed by both the 3′ region of the Agrobacterium tumefaciens nopaline synthase gene (nos) and the 3′ region of the potato proteinase inhibitor II (pinII) gene. The DNA insertion transcription region comprises a rice actin 1 promoter, a rice actin 1 exon 1 intron1 enhancer, an att-flanked insertion site and the 3′ region of the potato pinII gene. Following standard procedures provided by Invitrogen the att-flanked insertion region is replaced by recombination with DNA from an oil-associated gene, in a sense orientation for expression of the cognate protein from an oil-associated gene and in a gene suppression orientation (i.e. either anti-sense orientation or in a sense- and anti-sense orientation) for a suppression of an oil associated gene. Although the vector with DNA from an oil-associated gene inserted at the att-flanked insertion region is useful for plant transformation by direct DNA delivery, such as microprojectile bombardment, it is preferable to bombard target plant tissue with tandem transcription units that have been cut from the vector. For Agrobacterium-mediated transformation of plants the vector also comprises T-DNA borders from Agrobacterium flanking the transcription units.

[0209] Vectors for Agrobacterium-mediated transformation are prepared with recombinant DNA from each of the oil-associated genes having a sequence of SEQ ID NO: 74 through SEQ ID NO: 146 and for each of the homologous oil-associated genes encoding a protein having an amino acid sequence of SEQ ID NO: 220 through SEQ ID NO: 2337 with the DNA solely in sense orientation for expression of the oil-associated protein. Each vector is transformed into corn callus which is propagated into a plant that is grown to produce transgenic seed. Progeny plants are self-pollinated to produce seed which is selected for homozygous seed. Homozygous seed is used for producing inbred plants, for introgressing the trait into elite lines, and for crossing to make hybrid seed. Progeny transgenic plants (both inbreds of the transgenic plant and hybrids with other corn lines) comprise the recombinant DNA from an oil-associated gene and have enhanced oil in seed. Transgenic corn including inbred and hybrids with enhanced oil are also produced with recombinant DNA from each of the homologous genes of an oil-associated gene that encode a protein having an amino acid sequence of SEQ ID NO:220 through SEQ ID NO:2337. Transgenic corn plants with recombinant DNA from each oil-associated gene and each homolog of an oil-associated gene are also produced where the rice actin 1 promoter and enhancer are replaced with each of the promoters in the group consisting of a maize globulin 1 promoter, a maize L3 oleosin promoter, a maize emb5 promoter, a zein Z27 promoter, a gamma coixin promoter, and a CaMV 35S promoter. Seed produced by the plants is provided to growers to enable production of corn crops with enhanced oil.

[0210] Vectors for Agrobacterium-mediated transformation are also prepared with recombinant DNA from each of the oil-associated genes having a sequence of SEQ ID NO: 74 through SEQ ID NO: 146 in a gene suppression orientation for suppression of the maize endogenous oil-associated gene. Each vector is transformed into corn callus which is propagated into a plant that is grown to produce transgenic seed. Progeny plants are self-pollinated to produce seed which is selected for homozygous seed. Homozygous seed is used for producing inbred plants, for introgressing the trait into elite lines, and for crossing to make hybrid seed. Progeny transgenic plants (both inbreds of the transgenic plant and hybrids with other corn lines) comprise the recombinant DNA from an oil-associated gene and have reduced oil in seed. Transgenic corn plants with recombinant DNA for suppressing each oil-associated gene are also produced where the rice actin 1 promoter and enhancer are replaced with each of the promoters in the group consisting of a maize globulin 1 promoter, a maize L3 oleosin promoter, a maize emb5 promoter, a zein Z27 promoter, a gamma coixin promoter, and a CaMV 35S promoter. Seed produced by the plants is provided to growers to enable production of corn crops with reduced oil.

TABLE 7
Elements of an exemplary corn transformation vector

| FUNCTION | ELEMENT | REFERENCE |
|---|---|---|
| | Rice actin 1 | U.S. Pat. No. 5,641,876 |
| | promoter | |
| DNA insertion | Rice actin 1 | U.S. Pat. No. 5,641,876 |
| transcription region | promoter | |
| DNA insertion | [symbol] actin 1 | [symbol] g Technology |
| transcription region | exon 1, intron 1 | Instruction Manual |
| (att-flanked | enhancer | |
| insertion region) | | |
| | CmR gene | GATEWAY ™Cloning |
| | | Technology Instruction |
| | | Manual |
| | ccdA, ccdB genes | GATEWAY ™Cloning |
| | | Technology Instruction |
| | | Manual |
| | attR2 | GATEWAY ™Cloning |
| | | Technology Instruction |
| | | Manual |
| DNA insertion | Potato pinII | An et al. (1989) Plant |
| transcription region | 3′ region | Cell 1: 115-122 |
| selectable marker | CaMV 35S promoter | U.S. Pat. No. 5,858,742 |
| transcription region | | |
| | nptII selectable | U.S. Pat. No. 5,858,742 |
| | marker | |
| | nos 3region | U.S. Pat. No. 5,858,742 |
| | PinII 3′ region | An et al. (1989) Plant |
| | | Cell 1: 115-122 |
| | ColE1 origin of | |
| | replication | |
| | F1 origin of | |
| | replication | |
| | Bla ampicillin | |
| | resistance | |

### EXAMPLE 3

[0211] This example illustrates transgenic soybean with altered oil level using recombinant DNA from an oil-associated gene.

[0212] GATEWAY™ destination vectors (available from Invitrogen Life Technologies, Carlsbad, Calif.) are constructed for insertion of recombinant DNA from oil-associated genes for soybean transformation. Constructs for use in transformation of soybean are prepared by restriction enzyme based cloning into a common expression vector. Elements of an exemplary common expression vector are shown in Table 8 below and include a selectable marker expression cassette and a gene of interest expression cassette. The selectable marker expression cassette comprises Arabidopsis act 7 gene (AtAct7) promoter with intron and 5′UTR, the transit peptide of Arabidopsis EPSPS, the synthetic CP4 coding region with dicot preferred codon usage and a 3′ UTR of the nopaline synthase gene. The gene of interest expression cassette comprises a Cauliflower Mosaic Virus 35S promoter operably linked to an oil-associated gene in a sense orientation for expression of an oil-enhancing protein and in a gene suppression orientation (i.e. either anti-sense orientation or in a sense- and anti-sense orientation for suppression of an oil-associated gene.

[0213] Vectors similar to that described above are be constructed for use in Agrobacterium mediated soybean transformation systems, with recombinant DNA from each of the oil-associated genes having a sequence of SEQ ID NO:74 though SEQ ID NO:146 and homologous genes which encode proteins with an amino acid sequence of SEQ ID NO:220 through SEQ ID NO:2337 with the DNA in sense orientation for expression of the cognate protein. Transgenic soybean plants are produced using vectors for each oil-associated gene and homolog; the transgenic soybean plants have enhanced oil in the seed. Transgenic soybean plants are also produced for recombinant DNA from each of the oil-associated genes and homologs is transcribed by each of the promoters in the group consisting of a maize globulin 1 promoter, a maize L3 oleosin promoter, a maize emb5 promoter, a zein Z27 promoter, a gamma coixin promoter, and a CaMV 35S promoter. Seed produced by the plants is provided to growers to enable production of soybean crops with enhanced oil.

[0214] Vectors for Agrobacterium-mediated transformation are also prepared with recombinant DNA from each of the homologs of oil-associated genes from Glycine max, e.g. DNA encoding the protein with the amino acid sequence of SEQ ID NO:244, 318, 318, 353 and each of the others listed in Table 5, in a gene suppression orientation for suppression of the endogenous soybean homolog. Each vector is transformed into corn callus which is propagated into a plant that is grown to produce transgenic seed. Progeny plants are self-pollinated to produce seed which is selected for homozygous seed. Homozygous seed is used for producing inbred plants, for introgressing the trait into elite lines, and for crossing to make hybrid seed. Progeny transgenic plants (both inbreds of the transgenic plant and hybrids with other corn lines) comprise the recombinant DNA from an oil-associated gene and have reduced oil in seed. Transgenic corn plants with recombinant DNA for suppressing each oil-associated gene are also produced where the rice actin 1 promoter and enhancer are replaced with each of the promoters in the group consisting of a maize globulin 1 promoter, a maize L3 oleosin promoter, a maize emb5 promoter, a zein Z27 promoter, a gamma coixin promoter, and a CaMV 35S promoter. Seed produced by the plants is provided to growers to enable production of corn crops with reduced oil.

TABLE 8
Elements of an exemplary soybean transformation construct

| Function | Element | Reference |
|---|---|---|
| Agro transformation | B-ARGtu.right border | Depicker, A. et |
| | | al (1982) Mol Appl |
| | | Genet 1: 561-573 |
| Antibiotic resistance | CR-Ec.aadA-SPC/STR | |
| Represser of primers | CR-Ec.rop | |
| from the ColE1 plasmid | | |
| Origin of replication | OR-Ec.oriV-RK2 | |
| Agro transformation | B-ARGtu.left border | Barker, R. F. et |
| | | al (1983) Plant |
| | | Mol Biol 2: |
| | | 335-350 |
| Plant selectable | Arabidopsis act 7 | McDowell et al. |
| marker expression | gene (AtAct7) | (1996) Plant |
| cassette | promoter with | Physiol. 111: |
| | intron and 5′UTR | 699-711. |
| | 5′ UTR of | |
| | Arabidopsis act 7 | |
| | gene | |
| | Intron in 5′UTR | |
| | of AtAct7 | |
| | Transit peptide | Klee, H. J. et al |
| | region of | (1987) MGG 210: |
| | Arabidopsis EPSPS | 437-442 |
| | Synthetic CP4 | |
| | coding region with | |
| | dicot preferred | |
| | codon usage | |
| | A 3′ UTR of the | U.S. Pat. No. |
| | nopaline synthase | 5,858,742 |
| | gene of | |
| | Agrobacterium | |
| | tumefaciens Ti | |
| | plasmid | |
| Plant gene of | Promoter for 35S | U.S. Pat. No. |
| interest expression | RNA from CaMV | 5,322,938 |
| cassette | containing a | |
| | duplication of | |
| | the −90 to −350 | |
| | region | |
| | Gene of interest | |
| | insertion site | |
| | Cotton E6 3′ | GenBank accession |
| | end | U30508 |

[0215] TABLE 1

| | | | | | | ALLELE1 | ALLELE2 | ALLELE3 | ALLELE4 | |
|---|---|---|---|---|---|---|---|---|---|---|
| SEQ_NUM | SEQ_ID | MUTATION_ID | START_POS | END_POS | TYPE | STRAINS1 | STRAINS2 | STRAINS3 | STRAINS4 | CANDIDATE_ID |
| 1 | Amplicon150 | 548 | 85 | 85 | SNP | A | | C | | MRT4577_407583C |
| 1 | Amplicon150 | 549 | 108 | 108 | SNP | C | | T | | MRT4577_407583C |
| 1 | Amplicon150 | 550 | 158 | 158 | SNP | A | | T | | MRT4577_407583C |
| 1 | Amplicon150 | 551 | 175 | 175 | SNP | G | | T | | MRT4577_407583C |
| 2 | Amplicon50699 | 4463 | 282 | 282 | SNP | C | b73 | T | mo17 | MRT4577_37957C |
| 3 | Amplicon174322 | 8937 | 152 | 152 | SNP | A | mo17 | T | b73 | MRT4577_306229C |
| 4 | Amplicon174423 | 8979 | 197 | 197 | SNP | A | mo17 | T | b73 | MRT4577_305583C |
| 5 | Amplicon175589 | 9626 | 239 | 239 | SNP | C | mo17 | G | b73 | MRT4577_189292C |
| 5 | Amplicon175589 | 9627 | 261 | 261 | SNP | A | b73 | C | mo17 | MRT4577_189292C |
| 6 | Amplicon175758 | 9739 | 291 | 291 | SNP | A | b73 | G | mo17 | MRT4577_409052C |
| 7 | Amplicon176352 | 9927 | 41 | 41 | SNP | A | mo17 | T | b73 | MRT4577_371170C |
| 7 | Amplicon176352 | 10667 | 309 | 309 | SNP | A | mo17 | G | b73 | MRT4577_371170C |
| 8 | Amplicon176822 | 11713 | 301 | 301 | SNP | C | mo17 | G | b73 | MRT4577_169297C |
| 8 | Amplicon176822 | 13100 | 287 | 287 | SNP | A | b73 | C | mo17 | MRT4577_169297C |
| 9 | Amplicon177147 | 13685 | 231 | 231 | SNP | A | b73 | G | mo17 | MRT4577_273665C |
| 9 | Amplicon177147 | 13687 | 246 | 246 | SNP | C | b73 | T | mo17 | MRT4577_273665C |
| 9 | Amplicon177147 | 13688 | 301 | 301 | SNP | A | b73 | C | mo17 | MRT4577_273665C |
| 9 | Amplicon177147 | 13689 | 393 | 393 | SNP | A | b73 | C | mo17 | MRT4577_273665C |
| 9 | Amplicon177147 | 13691 | 490 | 490 | SNP | C | mo17 | T | b73 | MRT4577_273665C |
| 10 | Amplicon177165 | 13783 | 67 | 67 | SNP | A | b73 | G | mo17 | MRT4577_285101C |
| 10 | Amplicon177165 | 13785 | 102 | 102 | SNP | C | mo17 | T | b73 | MRT4577_285101C |
| 10 | Amplicon177165 | 13787 | 112 | 112 | IND | * | mo17 | T | b73 | MRT4577_285101C |
| 10 | Amplicon177165 | 13791 | 144 | 144 | SNP | C | mo17 | T | b73 | MRT4577_285101C |
| 10 | Amplicon177165 | 13793 | 145 | 145 | SNP | A | mo17 | T | b73 | MRT4577_285101C |
| 10 | Amplicon177165 | 13795 | 191 | 191 | SNP | A | mo17 | T | b73 | MRT4577_285101C |
| 10 | Amplicon177165 | 13797 | 192 | 192 | SNP | A | b73 | C | mo17 | MRT4577_285101C |
| 10 | Amplicon177165 | 13799 | 194 | 194 | SNP | C | mo17 | G | b73 | MRT4577_285101C |
| 10 | Amplicon177165 | 13801 | 230 | 230 | SNP | A | b73 | G | mo17 | MRT4577_285101C |
| 10 | Amplicon177165 | 13803 | 242 | 244 | IND | *** | b73 | TAC | mo17 | MRT4577_285101C |
| 10 | Amplicon177165 | 13805 | 275 | 275 | SNP | A | b73 | G | mo17 | MRT4577_285101C |
| 10 | Amplicon177165 | 13807 | 335 | 335 | SNP | A | mo17 | C | b73 | MRT4577_285101C |
| 10 | Amplicon177165 | 13811 | 568 | 568 | SNP | C | b73 | T | mo17 | MRT4577_285101C |
| 10 | Amplicon177165 | 15184 | 391 | 391 | SNP | C | b73 | T | mo17 | MRT4577_285101C |
| 11 | Amplicon177361 | 14692 | 75 | 75 | SNP | C | b73 | G | mo17 | MRT4577_284415C |
| 11 | Amplicon177361 | 14694 | 105 | 105 | SNP | A | mo17 | C | b73 | MRT4577_284415C |
| 11 | Amplicon177361 | 14697 | 529 | 529 | SNP | C | b73 | T | mo17 | MRT4577_284415C |
| 11 | Amplicon177361 | 14698 | 557 | 557 | SNP | C | b73 | T | mo17 | MRT4577_284415C |
| 11 | Amplicon177361 | 14700 | 561 | 561 | SNP | G | mo17 | T | b73 | MRT4577_284415C |
| 12 | Amplicon177729 | 16576 | 64 | 64 | SNP | C | mo17 | T | b73 | MRT4577_38704C |
| 12 | Amplicon177729 | 16578 | 84 | 84 | SNP | A | mo17 | T | b73 | MRT4577_38704C |
| 12 | Amplicon177729 | 16582 | 209 | 209 | SNP | G | mo17 | T | b73 | MRT4577_38704C |
| 12 | Amplicon177729 | 16584 | 249 | 249 | SNP | C | mo17 | T | b73 | MRT4577_38704C |
| 12 | Amplicon177729 | 16585 | 251 | 254 | IND | **** | b73 | GGAC | mo17 | MRT4577_38704C |
| 12 | Amplicon177729 | 16588 | 332 | 332 | SNP | G | mo17 | T | b73 | MRT4577_38704C |
| 12 | Amplicon177729 | 16589 | 378 | 378 | SNP | G | mo17 | T | b73 | MRT4577_38704C |
| 12 | Amplicon177729 | 16591 | 392 | 392 | SNP | A | b73 | T | mo17 | MRT4577_38704C |
| 12 | Amplicon177729 | 16593 | 398 | 398 | SNP | C | b73 | T | mo17 | MRT4577_38704C |
| 12 | Amplicon177729 | 16595 | 399 | 399 | IND | * | b73 | T | mo17 | MRT4577_38704C |
| 12 | Amplicon177729 | 17900 | 156 | 156 | SNP | A | mo17 | G | b73 | MRT4577_38704C |
| 12 | Amplicon177729 | 17908 | 257 | 260 | IND | **** | b73 | CTGG | mo17 | MRT4577_38704C |
| 13 | Amplicon177848 | 17120 | 151 | 151 | SNP | A | mo17 | G | b73 | MRT4577_47332C |
| 13 | Amplicon177848 | 18439 | 172 | 172 | SNP | A | b73 | G | mo17 | MRT4577_47332C |
| 14 | Amplicon178666 | 21190 | 286 | 286 | SNP | A | b73 | G | mo17 | MRT4577_386264C |
| 14 | Amplicon178666 | 21192 | 499 | 499 | SNP | C | mo17 | T | b73 | MRT4577_386264C |
| 15 | Amplicon178700 | 22717 | 64 | 64 | SNP | A | mo17 | T | b73 | MRT4577_25879C |
| 16 | Amplicon178723 | 21524 | 116 | 116 | IND | * | mo17 | T | b73 | MRT4577_419574C |
| 16 | Amplicon178723 | 21526 | 118 | 118 | IND | * | mo17 | A | b73 | MRT4577_419574C |
| 16 | Amplicon178723 | 21528 | 210 | 216 | IND | ******* | b73 | AGCTAGC | mo17 | MRT4577_419574C |
| 16 | Amplicon178723 | 21530 | 218 | 218 | IND | * | b73 | T | mo17 | MRT4577_419574C |
| 16 | Amplicon178723 | 21532 | 482 | 482 | SNP | C | mo17 | T | b73 | MRT4577_419574C |
| 16 | Amplicon178723 | 21533 | 486 | 486 | SNP | C | mo17 | G | b73 | MRT4577_419574C |
| 16 | Amplicon178723 | 21535 | 488 | 488 | SNP | C | b73 | G | mo17 | MRT4577_419574C |
| 16 | Amplicon178723 | 21536 | 489 | 489 | IND | * | mo17 | T | b73 | MRT4577_419574C |
| 16 | Amplicon178723 | 21539 | 491 | 491 | SNP | C | b73 | T | mo17 | MRT4577_419574C |
| 16 | Amplicon178723 | 21541 | 497 | 497 | SNP | A | mo17 | T | b73 | MRT4577_419574C |
| 16 | Amplicon178723 | 21543 | 501 | 502 | IND | ** | mo17 | GC | b73 | MRT4577_419574C |
| 16 | Amplicon178723 | 21545 | 504 | 504 | SNP | A | b73 | G | mo17 | MRT4577_419574C |
| 16 | Amplicon178723 | 22775 | 527 | 527 | SNP | A | mo17 | G | b73 | MRT4577_419574C |
| 17 | Amplicon178785 | 23091 | 170 | 170 | SNP | G | b73 | T | mo17 | MRT4577_414575C |
| 18 | Amplicon178833 | 23289 | 251 | 251 | SNP | A | b73 | G | mo17 | MRT4577_199838C |
| 19 | Amplicon179515 | 26314 | 17 | 17 | SNP | A | b73 | G | mo17 | MRT4577_409604C |
| 19 | Amplicon179515 | 26316 | 34 | 34 | IND | * | b73 | A | mo17 | MRT4577_409604C |
| 19 | Amplicon179515 | 26318 | 96 | 96 | SNP | A | b73 | G | mo17 | MRT4577_409604C |
| 19 | Amplicon179515 | 26319 | 133 | 133 | SNP | A | b73 | G | mo17 | MRT4577_409604C |
| 19 | Amplicon179515 | 26321 | 162 | 162 | SNP | C | mo17 | G | b73 | MRT4577_409604C |
| 19 | Amplicon179515 | 26322 | 282 | 284 | IND | *** | b73 | CTG | mo17 | MRT4577_409604C |
| 19 | Amplicon179515 | 26326 | 352 | 352 | SNP | A | mo17 | C | b73 | MRT4577_409604C |
| 19 | Amplicon179515 | 27447 | 311 | 311 | SNP | C | b73 | G | mo17 | MRT4577_409604C |
| 20 | Amplicon235434 | 29819 | 65 | 65 | SNP | C | b73 | T | mo17 | MRT4577_391398C |
| 20 | Amplicon235434 | 29820 | 109 | 109 | SNP | A | b73 | G | mo17 | MRT4577_391398C |
| 20 | Amplicon235434 | 29821 | 121 | 121 | SNP | A | mo17 | G | b73 | MRT4577_391398C |
| 20 | Amplicon235434 | 29822 | 122 | 122 | SNP | A | mo17 | T | b73 | MRT4577_391398C |
| 20 | Amplicon235434 | 29823 | 181 | 181 | SNP | C | mo17 | T | b73 | MRT4577_391398C |
| 20 | Amplicon235434 | 29824 | 187 | 187 | SNP | A | mo17 | G | b73 | MRT4577_391398C |
| 20 | Amplicon235434 | 29825 | 203 | 203 | SNP | A | b73 | C | mo17 | MRT4577_391398C |
| 20 | Amplicon235434 | 29826 | 211 | 211 | SNP | A | mo17 | G | b73 | MRT4577_391398C |
| 20 | Amplicon235434 | 29827 | 216 | 216 | SNP | C | b73 | T | mo17 | MRT4577_391398C |
| 21 | Amplicon235455 | 29867 | 81 | 84 | IND | **** | mo17 | TGAG | b73 | MRT4577_234188C |
| 21 | Amplicon235455 | 29868 | 195 | 196 | IND | ** | mo17 | AA | b73 | MRT4577_234188C |
| 21 | Amplicon235455 | 29869 | 363 | 363 | SNP | A | b73 | G | mo17 | MRT4577_234188C |
| 21 | Amplicon235455 | 29870 | 365 | 365 | SNP | C | mo17 | G | b73 | MRT4577_234188C |
| 21 | Amplicon235455 | 29871 | 375 | 375 | SNP | A | mo17 | C | b73 | MRT4577_234188C |
| 22 | Amplicon236049 | 31050 | 34 | 34 | SNP | A | b73 | C | mo17 | MRT4577_264682C |
| 22 | Amplicon236049 | 31051 | 36 | 36 | SNP | A | b73 | C | mo17 | MRT4577_264682C |
| 22 | Amplicon236049 | 31052 | 38 | 38 | SNP | A | b73 | G | mo17 | MRT4577_264682C |
| 22 | Amplicon236049 | 31053 | 47 | 47 | SNP | A | mo17 | T | b73 | MRT4577_264682C |
| 22 | Amplicon236049 | 31054 | 48 | 48 | SNP | A | mo17 | G | b73 | MRT4577_264682C |
| 22 | Amplicon236049 | 31055 | 49 | 49 | SNP | C | b73 | G | mo17 | MRT4577_264682C |
| 22 | Amplicon236049 | 31056 | 52 | 52 | SNP | A | b73 | T | mo17 | MRT4577_264682C |
| 22 | Amplicon236049 | 31057 | 54 | 54 | SNP | C | b73 | T | mo17 | MRT4577_264682C |
| 22 | Amplicon236049 | 31058 | 55 | 55 | SNP | A | b73 | C | mo17 | MRT4577_264682C |
| 22 | Amplicon236049 | 31059 | 56 | 56 | SNP | A | b73 | C | mo17 | MRT4577_264682C |
| 22 | Amplicon236049 | 31060 | 57 | 57 | SNP | G | b73 | T | mo17 | MRT4577_264682C |
| 22 | Amplicon236049 | 31061 | 59 | 59 | SNP | C | b73 | G | mo17 | MRT4577_264682C |
| 22 | Amplicon236049 | 31062 | 63 | 63 | SNP | C | b73 | T | mo17 | MRT4577_264682C |
| 22 | Amplicon236049 | 31063 | 65 | 66 | IND | ** | mo17 | TC | b73 | MRT4577_264682C |
| 22 | Amplicon236049 | 31064 | 126 | 126 | SNP | A | b73 | C | mo17 | MRT4577_264682C |
| 22 | Amplicon236049 | 31065 | 180 | 180 | SNP | C | mo17 | G | b73 | MRT4577_264682C |
| 22 | Amplicon236049 | 31066 | 540 | 540 | SNP | G | mo17 | T | b73 | MRT4577_264682C |
| 23 | Amplicon236326 | 31684 | 260 | 260 | SNP | A | b73 | T | mo17 | MRT4577_287055C |
| 24 | Amplicon236499 | 32049 | 183 | 183 | SNP | C | b73 | T | mo17 | MRT4577_49099C |
| 24 | Amplicon236499 | 32050 | 402 | 402 | SNP | C | mo17 | T | b73 | MRT4577_49099C |
| 24 | Amplicon236499 | 32051 | 403 | 403 | SNP | A | mo17 | G | b73 | MRT4577_49099C |
| 25 | Amplicon236541 | 32137 | 258 | 258 | IND | * | b73 | A | mo17 | MRT4577_346921C |
| 25 | Amplicon236541 | 32138 | 420 | 430 | IND | *********** | mo17 | CCGATCCATCT | b73 | MRT4577_346921C |
| 26 | Amplicon236590 | 32244 | 27 | 27 | SNP | C | b73 | T | mo17 | MRT4577_257780C |
| 26 | Amplicon236590 | 32245 | 82 | 82 | SNP | A | b73 | G | mo17 | MRT4577_257780C |
| 26 | Amplicon236590 | 32246 | 92 | 98 | IND | ******* | mo17 | AGTGCTG | b73 | MRT4577_257780C |
| 26 | Amplicon236590 | 32247 | 162 | 162 | SNP | C | b73 | T | mo17 | MRT4577_257780C |
| 26 | Amplicon236590 | 32248 | 275 | 275 | SNP | C | b73 | T | mo17 | MRT4577_257780C |
| 27 | Amplicon276497 | 33373 | 96 | 96 | SNP | C | mo17 | T | b73 | MRT4577_410376C |
| 27 | Amplicon276497 | 33374 | 128 | 128 | SNP | C | mo17 | T | b73 | MRT4577_410376C |
| 27 | Amplicon276497 | 33375 | 131 | 131 | SNP | C | mo17 | T | b73 | MRT4577_410376C |
| 27 | Amplicon276497 | 33376 | 363 | 363 | SNP | C | b73 | G | mo17 | MRT4577_410376C |
| 27 | Amplicon276497 | 33377 | 371 | 371 | SNP | G | b73 | T | mo17 | MRT4577_410376C |
| 28 | Amplicon277511 | 34895 | 48 | 48 | SNP | C | b73 | G | mo17 | MRT4577_233403C |
| 28 | Amplicon277511 | 34896 | 49 | 49 | SNP | C | b73 | T | mo17 | MRT4577_233403C |
| 28 | Amplicon277511 | 34897 | 53 | 53 | IND | * | b73 | C | mo17 | MRT4577_233403C |
| 28 | Amplicon277511 | 34898 | 53 | 54 | IND | ** | b73 | C* | mo17 | MRT4577_233403C |
| 28 | Amplicon277511 | 34899 | 76 | 76 | SNP | C | b73 | T | mo17 | MRT4577_233403C |
| 28 | Amplicon277511 | 34900 | 308 | 308 | SNP | A | b73 | C | mo17 | MRT4577_233403C |
| 28 | Amplicon277511 | 34901 | 345 | 345 | SNP | A | mo17 | G | b73 | MRT4577_233403C |
| 28 | Amplicon277511 | 34902 | 348 | 348 | SNP | C | b73 | T | mo17 | MRT4577_233403C |
| 28 | Amplicon277511 | 34903 | 409 | 409 | SNP | C | mo17 | T | b73 | MRT4577_233403C |
| 29 | Amplicon277876 | 35338 | 105 | 105 | SNP | C | mo17 | G | b73 | MRT4577_294774C |
| 29 | Amplicon277876 | 35339 | 330 | 334 | IND | ***** | b73 | CAAAG | mo17 | MRT4577_294774C |
| 29 | Amplicon277876 | 35340 | 368 | 368 | SNP | A | b73 | G | mo17 | MRT4577_294774C |
| 30 | Amplicon277914 | 35377 | 67 | 67 | SNP | C | b73 | G | mo17 | MRT4577_402771C |
| 31 | Amplicon277962 | 35407 | 32 | 32 | SNP | A | mo17 | G | b73 | MRT4577_397598C |
| 31 | Amplicon277962 | 35408 | 221 | 221 | SNP | A | mo17 | C | b73 | MRT4577_397598C |
| 31 | Amplicon277962 | 35409 | 293 | 293 | SNP | A | b73 | C | mo17 | MRT4577_397598C |
| 31 | Amplicon277962 | 35410 | 340 | 340 | SNP | A | mo17 | G | b73 | MRT4577_397598C |
| 32 | Amplicon310739 | 36286 | 336 | 337 | IND | ** | mo17 | AT | b73 | MRT4577_204611C |
| 32 | Amplicon310739 | 36287 | 436 | 437 | IND | ** | b73 | CT | mo17 | MRT4577_204611C |
| 32 | Amplicon310739 | 36288 | 456 | 456 | SNP | A | b73 | G | mo17 | MRT4577_204611C |
| 33 | Amplicon310854 | 36487 | 202 | 204 | IND | *** | b73 | TGG | mo17 | MRT4577_404797C |
| 33 | Amplicon310854 | 36488 | 228 | 229 | IND | ** | b73 | AT | mo17 | MRT4577_404797C |
| 33 | Amplicon310854 | 36489 | 236 | 236 | IND | * | mo17 | T | b73 | MRT4577_404797C |
| 33 | Amplicon310854 | 36490 | 244 | 244 | SNP | G | b73 | T | mo17 | MRT4577_404797C |
| 33 | Amplicon310854 | 36491 | 273 | 275 | IND | *** | b73 | TAG | mo17 | MRT4577_404797C |
| 33 | Amplicon310854 | 36492 | 273 | 276 | IND | **** | b73 | TAGC | mo17 | MRT4577_404797C |
| 33 | Amplicon310854 | 36493 | 316 | 317 | IND | ** | mo17 | GA | b73 | MRT4577_404797C |
| 33 | Amplicon310854 | 36494 | 320 | 320 | SNP | C | b73 | T | mo17 | MRT4577_404797C |
| 34 | Amplicon311738 | 37631 | 272 | 272 | SNP | C | mo17 | G | b73 | MRT4577_32764C |
| 34 | Amplicon311738 | 37632 | 334 | 341 | IND | ******** | mo17 | CGTTCTAA | b73 | MRT4577_32764C |
| 34 | Amplicon311738 | 37633 | 390 | 398 | IND | ********* | b73 | CGTTGGGGG | mo17 | MRT4577_32764C |
| 34 | Amplicon311738 | 37634 | 543 | 543 | SNP | G | mo17 | T | b73 | MRT4577_32764C |
| 35 | Amplicon346472 | 37715 | 393 | 393 | SNP | A | b73 | G | mo17 | MRT4577_284905C |
| 35 | Amplicon346472 | 37716 | 513 | 513 | SNP | C | b73 | T | mo17 | MRT4577_284905C |
| 35 | Amplicon346472 | 37717 | 523 | 523 | IND | * | mo17 | A | b73 | MRT4577_284905C |
| 35 | Amplicon346472 | 37718 | 564 | 564 | SNP | G | mo17 | T | b73 | MRT4577_284905C |
| 35 | Amplicon346472 | 37719 | 574 | 577 | IND | **** | b73 | ACGA | mo17 | MRT4577_284905C |
| 36 | Amplicon347285 | 38909 | 42 | 42 | SNP | A | b73 | T | mo17 | MRT4577_386764C |
| 36 | Amplicon347285 | 38910 | 94 | 97 | IND | **** | mo17 | TGCA | b73 | MRT4577_386764C |
| 36 | Amplicon347285 | 38911 | 100 | 100 | SNP | A | b73 | G | mo17 | MRT4577_386764C |
| 36 | Amplicon347285 | 38912 | 101 | 101 | SNP | C | b73 | T | mo17 | MRT4577_386764C |
| 36 | Amplicon347285 | 38913 | 106 | 106 | SNP | A | mo17 | C | b73 | MRT4577_386764C |
| 36 | Amplicon347285 | 38914 | 129 | 132 | IND | **** | mo17 | ATTA | b73 | MRT4577_386764C |
| 36 | Amplicon347285 | 38915 | 149 | 149 | SNP | A | mo17 | G | b73 | MRT4577_386764C |
| 36 | Amplicon347285 | 38916 | 153 | 153 | SNP | A | mo17 | C | b73 | MRT4577_386764C |
| 36 | Amplicon347285 | 38917 | 159 | 159 | SNP | C | b73 | T | mo17 | MRT4577_386764C |
| 36 | Amplicon347285 | 38918 | 176 | 176 | SNP | A | mo17 | G | b73 | MRT4577_386764C |
| 36 | Amplicon347285 | 38919 | 181 | 181 | IND | * | mo17 | G | b73 | MRT4577_386764C |
| 36 | Amplicon347285 | 38920 | 281 | 281 | SNP | C | b73 | T | mo17 | MRT4577_386764C |
| 36 | Amplicon347285 | 38921 | 376 | 376 | SNP | C | b73 | G | mo17 | MRT4577_386764C |
| 36 | Amplicon347285 | 38922 | 512 | 512 | SNP | G | b73 | T | mo17 | MRT4577_386764C |
| 36 | Amplicon347285 | 38923 | 518 | 518 | SNP | C | mo17 | T | b73 | MRT4577_386764C |
| 37 | Amplicon347598 | 39507 | 138 | 138 | SNP | C | mo17 | T | b73 | MRT4577_417745C |
| 37 | Amplicon347598 | 39508 | 434 | 435 | IND | ** | mo17 | CC | b73 | MRT4577_417745C |
| 37 | Amplicon347598 | 39509 | 478 | 480 | IND | *** | b73 | GCT | mo17 | MRT4577_417745C |
| 37 | Amplicon347598 | 39510 | 501 | 509 | IND | ********* | b73 | ATGGCAGGC | mo17 | MRT4577_417745C |
| 37 | Amplicon347598 | 39511 | 560 | 560 | SNP | C | mo17 | G | b73 | MRT4577_417745C |
| 38 | Amplicon390056 | 40189 | 325 | 325 | SNP | C | mo17 | T | b73 | MRT4577_43098C |
| 39 | Amplicon390137 | 40320 | 320 | 320 | SNP | C | b73 | T | mo17 | MRT4577_222465C |
| 40 | Amplicon391267 | 41850 | 55 | 55 | SNP | C | b73 | T | mo17 | MRT4577_326681C |
| 40 | Amplicon391267 | 41851 | 112 | 112 | SNP | C | b73 | G | mo17 | MRT4577_326681C |
| 40 | Amplicon391267 | 41852 | 120 | 120 | SNP | A | mo17 | T | b73 | MRT4577_326681C |
| 41 | Amplicon391526 | 42161 | 134 | 134 | SNP | G | mo17 | T | b73 | MRT4577_361986C |
| 41 | Amplicon391526 | 42162 | 194 | 194 | SNP | A | b73 | G | mo17 | MRT4577_361986C |
| 41 | Amplicon391526 | 42163 | 254 | 254 | SNP | A | mo17 | G | b73 | MRT4577_361986C |
| 41 | Amplicon391526 | 42164 | 320 | 320 | SNP | A | b73 | G | mo17 | MRT4577_361986C |
| 41 | Amplicon391526 | 42165 | 350 | 350 | SNP | C | mo17 | T | b73 | MRT4577_361986C |
| 41 | Amplicon391526 | 42166 | 374 | 374 | SNP | A | mo17 | G | b73 | MRT4577_361986C |
| 42 | Amplicon437734 | 42930 | 137 | 137 | SNP | A | mo17 | C | b73 | MRT4577_418799C |
| 42 | Amplicon437734 | 42931 | 196 | 196 | SNP | C | b73 | T | mo17 | MRT4577_418799C |
| 42 | Amplicon437734 | 42932 | 298 | 298 | SNP | A | b73 | G | mo17 | MRT4577_418799C |
| 42 | Amplicon437734 | 42933 | 339 | 339 | SNP | A | b73 | G | mo17 | MRT4577_418799C |
| 42 | Amplicon437734 | 42934 | 422 | 422 | SNP | A | b73 | G | mo17 | MRT4577_418799C |
| 42 | Amplicon437734 | 42935 | 428 | 428 | SNP | C | b73 | T | mo17 | MRT4577_418799C |
| 43 | Amplicon438229 | 43576 | 48 | 48 | SNP | A | b73 | T | mo17 | MRT4577_300134C |
| 43 | Amplicon438229 | 43577 | 49 | 49 | SNP | A | b73 | T | mo17 | MRT4577_300134C |
| 43 | Amplicon438229 | 43578 | 72 | 72 | SNP | A | mo17 | T | b73 | MRT4577_300134C |
| 43 | Amplicon438229 | 43579 | 154 | 154 | SNP | C | b73 | T | mo17 | MRT4577_300134C |
| 43 | Amplicon438229 | 43580 | 218 | 218 | SNP | C | b73 | T | mo17 | MRT4577_300134C |
| 43 | Amplicon438229 | 43581 | 275 | 275 | SNP | A | mo17 | C | b73 | MRT4577_300134C |
| 44 | Amplicon558095 | 51419 | 252 | 252 | SNP | C | b73 | T | mo17 | MRT4577_415225C |
| 45 | Amplicon558289 | 52078 | 105 | 105 | IND | * | mo17 | G | b73 | MRT4577_392856C |
| 45 | Amplicon558289 | 52080 | 107 | 107 | IND | * | mo17 | C | b73 | MRT4577_392856C |
| 45 | Amplicon558289 | 52081 | 351 | 351 | SNP | C | b73 | T | mo17 | MRT4577_392856C |
| 46 | Amplicon559759 | 58375 | 494 | 494 | SNP | C | mo17 | T | b73 | MRT4577_56004C |
| 47 | Amplicon559897 | 58904 | 120 | 120 | SNP | C | b73 | G | mo17 | MRT4577_403109C |
| 47 | Amplicon559897 | 58905 | 216 | 216 | SNP | A | mo17 | T | b73 | MRT4577_403109C |
| 47 | Amplicon559897 | 58906 | 314 | 314 | SNP | A | b73 | T | mo17 | MRT4577_403109C |
| 48 | Amplicon559922 | 59006 | 22 | 22 | SNP | A | b73 | T | mo17 | MRT4577_221761C |
| 48 | Amplicon559922 | 59007 | 34 | 34 | SNP | C | b73 | G | mo17 | MRT4577_221761C |
| 48 | Amplicon559922 | 59008 | 83 | 83 | SNP | C | mo17 | T | b73 | MRT4577_221761C |
| 48 | Amplicon559922 | 59009 | 184 | 184 | SNP | A | b73 | C | mo17 | MRT4577_221761C |
| 48 | Amplicon559922 | 59010 | 234 | 234 | SNP | G | b73 | T | mo17 | MRT4577_221761C |
| 48 | Amplicon559922 | 59011 | 261 | 261 | SNP | C | mo17 | T | b73 | MRT4577_221761C |
| 49 | Amplicon560371 | 60751 | 299 | 299 | SNP | A | mo17 | G | b73 | MRT4577_405424C |
| 49 | Amplicon560371 | 60753 | 371 | 371 | SNP | A | mo17 | T | b73 | MRT4577_405424C |
| 49 | Amplicon560371 | 60754 | 376 | 376 | SNP | A | b73 | C | mo17 | MRT4577_405424C |
| 49 | Amplicon560371 | 60755 | 445 | 445 | SNP | A | mo17 | G | b73 | MRT4577_405424C |
| 50 | Amplicon617780 | 69188 | 172 | 172 | SNP | A | mo17 | G | b73 | MRT4577_401949C |
| 51 | Amplicon671043 | 77568 | 250 | 250 | SNP | A | mo17 | G | b73 | MRT4577_417394C |
| 52 | Amplicon671315 | 78437 | 95 | 95 | SNP | C | mo17 | G | b73 | MRT4577_213040C |
| 52 | Amplicon671315 | 78438 | 138 | 138 | SNP | C | b73 | T | mo17 | MRT4577_213040C |
| 53 | Amplicon724218 | 82235 | 507 | 507 | SNP | A | mo17 | C | b73 | MRT4577_394773C |
| 54 | Amplicon993221 | 104389 | 211 | 211 | SNP | C | LH82 | T | 5CM1 | MRT4577_26957C |
| 54 | Amplicon993221 | 104390 | 225 | 225 | SNP | C | LH82 | G | 5CM1 | MRT4577_26957C |
| 54 | Amplicon993221 | 104391 | 226 | 226 | SNP | A | LH82 | G | 5CM1 | MRT4577_26957C |
| 54 | Amplicon993221 | 104392 | 227 | 227 | SNP | C | 5CM1 | T | LH82 | MRT4577_26957C |
| 54 | Amplicon993221 | 104393 | 231 | 231 | SNP | C | 5CM1 | T | LH82 | MRT4577_26957C |
| 54 | Amplicon993221 | 104394 | 233 | 233 | SNP | A | 5CM1 | G | LH82 | MRT4577_26957C |
| 54 | Amplicon993221 | 104395 | 252 | 252 | SNP | C | LH82 | G | 5CM1 | MRT4577_26957C |
| 55 | Amplicon993328 | 104809 | 23 | 23 | SNP | C | LH82 | T | 5CM1 | MRT4577_399958C |
| 55 | Amplicon993328 | 104810 | 24 | 24 | SNP | G | 5CM1 | T | LH82 | MRT4577_399958C |
| 55 | Amplicon993328 | 104811 | 25 | 25 | SNP | A | 5CM1 | G | LH82 | MRT4577_399958C |
| 55 | Amplicon993328 | 104812 | 26 | 26 | SNP | C | LH82 | T | 5CM1 | MRT4577_399958C |
| 55 | Amplicon993328 | 104813 | 27 | 27 | SNP | C | LH82 | T | 5CM1 | MRT4577_399958C |
| 55 | Amplicon993328 | 104814 | 28 | 28 | SNP | A | LH82 | C | 5CM1 | MRT4577_399958C |
| 55 | Amplicon993328 | 104815 | 29 | 29 | SNP | C | 5CM1 | G | LH82 | MRT4577_399958C |
| 55 | Amplicon993328 | 104816 | 30 | 30 | SNP | A | LH82 | G | 5CM1 | MRT4577_399958C |
| 55 | Amplicon993328 | 104817 | 31 | 31 | SNP | A | 5CM1 | G | LH82 | MRT4577_399958C |
| 55 | Amplicon993328 | 104818 | 32 | 32 | SNP | A | LH82 | T | 5CM1 | MRT4577_399958C |
| 55 | Amplicon993328 | 104819 | 34 | 34 | SNP | A | 5CM1 | C | LH82 | MRT4577_399958C |
| 55 | Amplicon993328 | 104820 | 35 | 35 | SNP | A | LH82 | C | 5CM1 | MRT4577_399958C |
| 55 | Amplicon993328 | 104821 | 36 | 36 | SNP | A | LH82 | T | 5CM1 | MRT4577_399958C |
| 55 | Amplicon993328 | 104822 | 46 | 46 | SNP | A | 5CM1 | C | LH82 | MRT4577_399958C |
| 55 | Amplicon993328 | 104823 | 97 | 97 | SNP | A | LH82 | C | 5CM1 | MRT4577_399958C |
| 55 | Amplicon993328 | 104824 | 98 | 100 | IND | *** | 5CM1 | AAA | LH82 | MRT4577_399958C |
| 55 | Amplicon993328 | 104825 | 184 | 184 | SNP | C | LH82 | T | 5CM1 | MRT4577_399958C |
| 55 | Amplicon993328 | 104826 | 213 | 213 | SNP | C | 5CM1 | T | LH82 | MRT4577_399958C |
| 55 | Amplicon993328 | 104827 | 276 | 276 | SNP | A | 5CM1 | G | LH82 | MRT4577_399958C |
| 55 | Amplicon993328 | 104828 | 475 | 475 | SNP | C | 5CM1 | T | LH82 | MRT4577_399958C |
| 56 | Amplicon993333 | 104845 | 33 | 33 | SNP | A | 5CM1 | G | LH82 | MRT4577_401698C |
| 56 | Amplicon993333 | 104846 | 41 | 41 | SNP | C | 5CM1 | T | LH82 | MRT4577_401698C |
| 56 | Amplicon993333 | 104847 | 142 | 142 | SNP | A | 5CM1 | T | LH82 | MRT4577_401698C |
| 56 | Amplicon993333 | 104848 | 324 | 324 | SNP | A | LH82 | C | 5CM1 | MRT4577_401698C |
| 56 | Amplicon993333 | 104849 | 366 | 366 | SNP | G | LH82 | T | 5CM1 | MRT4577_401698C |
| 56 | Amplicon993333 | 104850 | 400 | 400 | SNP | A | 5CM1 | C | LH82 | MRT4577_401698C |
| 56 | Amplicon993333 | 104851 | 432 | 432 | SNP | G | LH82 | T | 5CM1 | MRT4577_401698C |
| 56 | Amplicon993333 | 104852 | 435 | 435 | SNP | C | 5CM1 | T | LH82 | MRT4577_401698C |
| 56 | Amplicon993333 | 104853 | 456 | 456 | SNP | A | LH82 | T | 5CM1 | MRT4577_401698C |
| 56 | Amplicon993333 | 104854 | 457 | 457 | SNP | A | LH82 | T | 5CM1 | MRT4577_401698C |
| 56 | Amplicon993333 | 104855 | 461 | 461 | IND | * | LH82 | C | 5CM1 | MRT4577_401698C |
| 57 | Amplicon993789 | 106844 | 82 | 82 | SNP | A | 5CM1 | G | LH82 | MRT4577_289436C |
| 57 | Amplicon993789 | 106845 | 110 | 110 | SNP | A | LH82 | G | 5CM1 | MRT4577_289436C |
| 58 | Amplicon993841 | 107074 | 181 | 181 | SNP | C | 5CM1 | T | LH82 | MRT4577_221609C |
| 58 | Amplicon993841 | 107075 | 195 | 195 | SNP | C | 5CM1 | T | LH82 | MRT4577_221609C |
| 58 | Amplicon993841 | 107076 | 206 | 206 | SNP | C | LH82 | T | 5CM1 | MRT4577_221609C |
| 58 | Amplicon993841 | 107077 | 381 | 381 | SNP | A | LH82 | G | 5CM1 | MRT4577_221609C |
| 58 | Amplicon993841 | 107078 | 432 | 432 | SNP | C | LH82 | T | 5CM1 | MRT4577_221609C |
| 59 | Amplicon994045 | 107937 | 311 | 311 | SNP | A | 5CM1 | G | LH82 | MRT4577_28967C |
| 59 | Amplicon994045 | 107938 | 332 | 332 | SNP | C | 5CM1 | T | LH82 | MRT4577_28967C |
| 59 | Amplicon994045 | 107939 | 340 | 340 | SNP | G | LH82 | T | 5CM1 | MRT4577_28967C |
| 59 | Amplicon994045 | 107940 | 416 | 416 | SNP | A | 5CM1 | C | LH82 | MRT4577_28967C |
| 60 | Amplicon1017193 | 109396 | 440 | 449 | IND | ********** | LH82 | ACACACACAC | 5CM1 | MRT4577_151195C |
| 60 | Amplicon1017193 | 109397 | 482 | 482 | SNP | C | LH82 | G | 5CM1 | MRT4577_151195C |
| 60 | Amplicon1017193 | 109398 | 488 | 491 | IND | **** | LH82 | CTCA | 5CM1 | MRT4577_151195C |
| 60 | Amplicon1017193 | 109399 | 496 | 496 | SNP | C | LH82 | G | 5CM1 | MRT4577_151195C |
| 60 | Amplicon1017193 | 109400 | 500 | 500 | SNP | C | LH82 | G | 5CM1 | MRT4577_151195C |
| 60 | Amplicon1017193 | 109401 | 504 | 504 | SNP | C | LH82 | G | 5CM1 | MRT4577_151195C |
| 60 | Amplicon1017193 | 109402 | 511 | 511 | SNP | A | 5CM1 | G | LH82 | MRT4577_151195C |
| 60 | Amplicon1017193 | 109403 | 523 | 525 | IND | *** | LH82 | TTC | 5CM1 | MRT4577_151195C |
| 60 | Amplicon1017193 | 109404 | 540 | 540 | SNP | C | LH82 | G | 5CM1 | MRT4577_151195C |
| 61 | Amplicon1017331 | 110063 | 17 | 17 | SNP | G | 5CM1 | T | LH82 | MRT4577_412840C |
| 61 | Amplicon1017331 | 110064 | 21 | 21 | SNP | C | LH82 | G | 5CM1 | MRT4577_412840C |
| 61 | Amplicon1017331 | 110065 | 123 | 123 | SNP | A | 5CM1 | G | LH82 | MRT4577_412840C |
| 61 | Amplicon1017331 | 110066 | 245 | 248 | IND | **** | LH82 | TATA | 5CM1 | MRT4577_412840C |
| 61 | Amplicon1017331 | 110067 | 276 | 276 | SNP | A | 5CM1 | G | LH82 | MRT4577_412840C |
| 61 | Amplicon1017331 | 110068 | 281 | 281 | SNP | C | 5CM1 | G | LH82 | MRT4577_412840C |
| 61 | Amplicon1017331 | 110069 | 314 | 314 | SNP | A | LH82 | G | 5CM1 | MRT4577_412840C |
| 61 | Amplicon1017331 | 110070 | 375 | 375 | SNP | G | 5CM1 | T | LH82 | MRT4577_412840C |
| 62 | Amplicon1017493 | 110780 | 360 | 360 | SNP | A | LH82 | G | 5CM1 | MRT4577_45217C |
| 63 | Amplicon1017519 | 110886 | 94 | 99 | IND | ****** | LH82 | ATCTGC | 5CM1 | MRT4577_420096C |
| 63 | Amplicon1017519 | 110887 | 136 | 136 | SNP | C | LH82 | T | 5CM1 | MRT4577_420096C |
| 63 | Amplicon1017519 | 110888 | 262 | 265 | IND | **** | LH82 | TTAT | 5CM1 | MRT4577_420096C |
| 63 | Amplicon1017519 | 110889 | 356 | 356 | SNP | G | LH82 | T | 5CM1 | MRT4577_420096C |
| 63 | Amplicon1017519 | 110890 | 403 | 403 | IND | * | LH82 | T | 5CM1 | MRT4577_420096C |
| 63 | Amplicon1017519 | 110891 | 405 | 409 | IND | ***** | LH82 | CCTGT | 5CM1 | MRT4577_420096C |
| 63 | Amplicon1017519 | 110892 | 432 | 432 | SNP | A | 5CM1 | T | LH82 | MRT4577_420096C |
| 63 | Amplicon1017519 | 110894 | 465 | 471 | IND | ******* | LH82 | GAACCAA | 5CM1 | MRT4577_420096C |
| 63 | Amplicon1017519 | 110895 | 547 | 547 | SNP | C | 5CM1 | G | LH82 | MRT4577_420096C |
| 63 | Amplicon1017519 | 110896 | 553 | 553 | IND | * | LH82 | A | 5CM1 | MRT4577_420096C |
| 63 | Amplicon1017519 | 110897 | 555 | 557 | IND | *** | LH82 | CAT | 5CM1 | MRT4577_420096C |
| 64 | Amplicon1050237 | 112139 | 94 | 94 | SNP | C | 5CM1 | G | LH82 | MRT4577_220452C |
| 65 | Amplicon1459206 | 143407 | 116 | 116 | SNP | C | LH82 | T | 5CM1 | MRT4577_416979C |
| 65 | Amplicon1459206 | 143408 | 382 | 382 | SNP | G | 5CM1 | T | LH82 | MRT4577_416979C |
| 65 | Amplicon1459206 | 143409 | 517 | 517 | SNP | A | LH82 | C | 5CM1 | MRT4577_416979C |
| 66 | Amplicon1459208 | 143413 | 71 | 71 | SNP | A | 5CM1 | G | LH82 | MRT4577_5002C |
| 66 | Amplicon1459208 | 143418 | 206 | 206 | SNP | A | 5CM1 | T | LH82 | MRT4577_5002C |
| 67 | Amplicon1459269 | 144505 | 46 | 46 | SNP | C | b73 | T | mo17:5CM1:LH82 | MRT4577_400334C |
| 67 | Amplicon1459269 | 144506 | 89 | 92 | IND | **** | b73 | TCTA | mo17:5CM1:LH82 | MRT4577_400334C |
| 68 | Amplicon1459277 | 144731 | 170 | 170 | SNP | A | b73:mo17:5CM1 | G | LH82 | MRT4577_400556C |
| 68 | Amplicon1459277 | 144732 | 239 | 239 | SNP | A | b73:mo17:5CM1 | G | LH82 | MRT4577_400556C |
| 69 | Amplicon1459300 | 145200 | 103 | 103 | SNP | C | b73 | G | mo17:5CM1:LH82 | MRT4577_389607C |
| 69 | Amplicon1459300 | 145202 | 177 | 177 | SNP | A | b73 | G | mo17:5CM1:LH82 | MRT4577_389607C |
| 69 | Amplicon1459300 | 145203 | 178 | 178 | SNP | A | b73 | C | mo17:5CM1:LH82 | MRT4577_389607C |
| 69 | Amplicon1459300 | 145204 | 272 | 272 | SNP | C | b73 | G | mo17:5CM1:LH82 | MRT4577_389607C |
| 69 | Amplicon1459300 | 145205 | 455 | 458 | IND | **** | mo17:LH82 | ACGT | b73:5CM1 | MRT4577_389607C |
| 70 | Amplicon1459304 | 145260 | 159 | 159 | SNP | A | 5CM1 | C | LH82 | MRT4577_405388C |
| 70 | Amplicon1459304 | 145261 | 173 | 173 | SNP | C | LH82 | G | 5CM1 | MRT4577_405388C |
| 70 | Amplicon1459304 | 145263 | 236 | 236 | SNP | C | 5CM1 | T | LH82 | MRT4577_405388C |
| 70 | Amplicon1459304 | 145264 | 526 | 526 | SNP | C | 5CM1 | T | LH82 | MRT4577_405388C |
| 70 | Amplicon1459304 | 145266 | 575 | 575 | SNP | C | 5CM1 | T | LH82 | MRT4577_405388C |
| 71 | Amplicon1459369 | 146410 | 124 | 124 | SNP | G | b73:mo17:LH82 | T | 5CM1 | MRT4577_388272C |
| 71 | Amplicon1459369 | 146411 | 155 | 160 | IND | ****** | 5CM1 | ATCTTC | b73:mo17:LH82 | MRT4577_388272C |
| 71 | Amplicon1459369 | 146412 | 281 | 281 | SNP | C | 5CM1 | T | b73:mo17:LH82 | MRT4577_388272C |
| 71 | Amplicon1459369 | 146413 | 331 | 331 | SNP | A | LH82 | T | b73:mo17:5CM1 | MRT4577_388272C |
| 71 | Amplicon1459369 | 146414 | 332 | 332 | SNP | A | LH82 | C | b73:mo17:5CM1 | MRT4577_388272C |
| 71 | Amplicon1459369 | 146415 | 346 | 346 | SNP | A | b73:LH82 | G | mo17:5CM1 | MRT4577_388272C |
| 71 | Amplicon1459369 | 146416 | 553 | 553 | SNP | G | b73:mo17:LH82 | T | 5CM1 | MRT4577_388272C |
| 71 | Amplicon1459369 | 146417 | 556 | 556 | SNP | C | b73:mo17:LH82 | G | 5CM1 | MRT4577_388272C |
| 71 | Amplicon1459369 | 146418 | 557 | 557 | SNP | G | 5CM1 | T | b73:mo17:LH82 | MRT4577_388272C |
| 71 | Amplicon1459369 | 146419 | 559 | 559 | SNP | G | b73:mo17:LH82 | T | 5CM1 | MRT4577_388272C |
| 71 | Amplicon1459369 | 146420 | 560 | 560 | SNP | A | 5CM1 | T | b73:mo17:LH82 | MRT4577_388272C |
| 71 | Amplicon1459369 | 146421 | 561 | 561 | SNP | A | 5CM1 | T | b73:mo17:LH82 | MRT4577_388272C |
| 71 | Amplicon1459369 | 146422 | 562 | 562 | SNP | A | 5CM1 | T | b73:mo17:LH82 | MRT4577_388272C |
| 71 | Amplicon1459369 | 146423 | 563 | 563 | SNP | G | b73:mo17:LH82 | T | 5CM1 | MRT4577_388272C |
| 71 | Amplicon1459369 | 146424 | 564 | 564 | SNP | A | 5CM1 | G | b73:mo17:LH82 | MRT4577_388272C |
| 71 | Amplicon1459369 | 146425 | 565 | 565 | SNP | A | 5CM1 | G | b73:mo17:LH82 | MRT4577_388272C |
| 71 | Amplicon1459369 | 146426 | 566 | 566 | SNP | A | 5CM1 | T | b73:mo17:LH82 | MRT4577_388272C |
| 71 | Amplicon1459369 | 146427 | 567 | 567 | SNP | A | b73:mo17:LH82 | C | 5CM1 | MRT4577_388272C |
| 71 | Amplicon1459369 | 146428 | 569 | 569 | SNP | C | 5CM1 | T | b73:mo17:LH82 | MRT4577_388272C |
| 71 | Amplicon1459369 | 146429 | 570 | 570 | SNP | C | b73:mo17:LH82 | G | 5CM1 | MRT4577_388272C |
| 71 | Amplicon1459369 | 146430 | 571 | 571 | SNP | A | 5CM1 | T | b73:mo17:LH82 | MRT4577_388272C |
| 71 | Amplicon1459369 | 146431 | 575 | 575 | SNP | A | b73:mo17:LH82 | T | 5CM1 | MRT4577_388272C |
| 71 | Amplicon1459369 | 146432 | 576 | 576 | SNP | A | 5CM1 | T | b73:mo17:LH82 | MRT4577_388272C |
| 71 | Amplicon1459369 | 146433 | 577 | 577 | SNP | G | 5CM1 | T | b73:mo17:LH82 | MRT4577_388272C |
| 71 | Amplicon1459369 | 146434 | 578 | 578 | SNP | A | 5CM1 | G | b73:mo17:LH82 | MRT4577_388272C |
| 71 | Amplicon1459369 | 146435 | 579 | 579 | SNP | A | b73:mo17:LH82 | T | 5CM1 | MRT4577_388272C |
| 71 | Amplicon1459369 | 146436 | 581 | 581 | SNP | C | 5CM1 | G | b73:mo17:LH82 | MRT4577_388272C |
| 71 | Amplicon1459369 | 146437 | 582 | 582 | SNP | A | 5CM1 | T | b73:mo17:LH82 | MRT4577_388272C |
| 71 | Amplicon1459369 | 146438 | 583 | 583 | SNP | A | 5CM1 | G | b73:mo17:LH82 | MRT4577_388272C |
| 71 | Amplicon1459369 | 146439 | 584 | 584 | SNP | A | 5CM1 | G | b73:mo17:LH82 | MRT4577_388272C |
| 71 | Amplicon1459369 | 146441 | 588 | 588 | SNP | A | b73:mo17:LH82 | C | 5CM1 | MRT4577_388272C |
| 71 | Amplicon1459369 | 146442 | 589 | 589 | SNP | A | b73:mo17:LH82 | T | 5CM1 | MRT4577_388272C |
| 71 | Amplicon1459369 | 146443 | 590 | 590 | SNP | G | b73:mo17:LH82 | T | 5CM1 | MRT4577_388272C |
| 71 | Amplicon1459369 | 146444 | 591 | 591 | SNP | C | 5CM1 | G | b73:mo17:LH82 | MRT4577_388272C |
| 71 | Amplicon1459369 | 146445 | 593 | 593 | SNP | C | 5CM1 | G | b73:mo17:LH82 | MRT4577_388272C |
| 71 | Amplicon1459369 | 146446 | 594 | 594 | SNP | C | 5CM1 | T | b73:mo17:LH82 | MRT4577_388272C |
| 71 | Amplicon1459369 | 146447 | 595 | 595 | SNP | A | b73:mo17:LH82 | C | 5CM1 | MRT4577_388272C |
| 71 | Amplicon1459369 | 146448 | 596 | 596 | SNP | C | 5CM1 | T | b73:mo17:LH82 | MRT4577_388272C |
| 71 | Amplicon1459369 | 146449 | 598 | 598 | SNP | A | 5CM1 | G | b73:mo17:LH82 | MRT4577_388272C |
| 71 | Amplicon1459369 | 146450 | 599 | 599 | SNP | A | b73:mo17:LH82 | C | 5CM1 | MRT4577_388272C |
| 72 | Amplicon1460644 | 148039 | 95 | 95 | SNP | C | b73:5CM1 | T | mo17:LH82 | MRT4577_61311C |
| 72 | Amplicon1460644 | 148040 | 116 | 116 | SNP | A | LH82 | C | b73:mo17:5CM1 | MRT4577_61311C |
| 72 | Amplicon1460644 | 148041 | 126 | 126 | SNP | C | 5CM1 | T | b73:mo17:LH82 | MRT4577_61311C |
| 72 | Amplicon1460644 | 148042 | 140 | 140 | IND | * | 5CM1 | C | b73:mo17:LH82 | MRT4577_61311C |
| 72 | Amplicon1460644 | 148043 | 147 | 147 | SNP | A | mo17 | C | b73:5CM1:LH82 | MRT4577_61311C |
| 72 | Amplicon1460644 | 148044 | 172 | 172 | SNP | A | b73:5CM1 | G | mo17:LH82 | MRT4577_61311C |
| 72 | Amplicon1460644 | 148045 | 191 | 191 | SNP | A | b73:mo17:5CM1 | C | LH82 | MRT4577_61311C |
| 72 | Amplicon1460644 | 148046 | 193 | 193 | SNP | A | b73:5CM1 | G | mo17:LH82 | MRT4577_61311C |
| 72 | Amplicon1460644 | 148047 | 210 | 210 | SNP | A | b73:5CM1 | G | mo17:LH82 | MRT4577_61311C |
| 72 | Amplicon1460644 | 148048 | 218 | 218 | SNP | C | b73:mo17:5CM1 | T | LH82 | MRT4577_61311C |
| 72 | Amplicon1460644 | 148049 | 223 | 223 | SNP | A | LH82 | G | b73:mo17:5CM1 | MRT4577_61311C |
| 72 | Amplicon1460644 | 148050 | 253 | 253 | SNP | A | b73:5CM1 | G | mo17:LH82 | MRT4577_61311C |
| 72 | Amplicon1460644 | 148051 | 259 | 259 | SNP | A | b73:5CM1 | G | mo17:LH82 | MRT4577_61311C |
| 72 | Amplicon1460644 | 148052 | 274 | 274 | SNP | A | b73:5CM1:LH82 | G | mo17 | MRT4577_61311C |
| 72 | Amplicon1460644 | 148053 | 291 | 291 | SNP | A | b73 | G | mo17:5CM1:LH82 | MRT4577_61311C |
| 72 | Amplicon1460644 | 148054 | 296 | 296 | SNP | A | mo17:LH82 | G | b73:5CM1 | MRT4577_61311C |
| 72 | Amplicon1460644 | 148055 | 309 | 309 | SNP | C | mo17 | T | b73:5CM1:LH82 | MRT4577_61311C |
| 72 | Amplicon1460644 | 148056 | 326 | 340 | IND | *************** | b73:5CM1 | CCTTCGATGATATG | LH82 | MRT4577_61311C |
| 72 | Amplicon1460644 | 148057 | 343 | 357 | IND | *************** | mo17 | TCGACGATGACGCC | MRT4577_61311C | |
| 72 | Amplicon1460644 | 148058 | 360 | 360 | SNP | C | mo17:LH82 | G | b73:5CM1 | MRT4577_61311C |
| 72 | Amplicon1460644 | 148059 | 361 | 361 | SNP | C | mo17:LH82 | T | b73:5CM1 | MRT4577_61311C |
| 72 | Amplicon1460644 | 148060 | 368 | 368 | SNP | C | b73:5CM1 | T | mo17:LH82 | MRT4577_61311C |
| 72 | Amplicon1460644 | 148061 | 373 | 373 | SNP | A | mo17:LH82 | G | b73:5CM1 | MRT4577_61311C |
| 72 | Amplicon1460644 | 148062 | 376 | 376 | SNP | A | b73:5CM1 | G | mo17:LH82 | MRT4577_61311C |
| 72 | Amplicon1460644 | 148063 | 379 | 379 | SNP | G | b73:5CM1:LH82 | T | mo17 | MRT4577_61311C |
| 72 | Amplicon1460644 | 148064 | 383 | 383 | SNP | A | LH82 | C | b73:mo17:5CM1 | MRT4577_61311C |
| 72 | Amplicon1460644 | 148065 | 385 | 385 | SNP | A | b73:5CM1 | G | mo17:LH82 | MRT4577_61311C |
| 72 | Amplicon1460644 | 148066 | 394 | 394 | SNP | A | b73:5CM1:LH82 | G | mo17 | MRT4577_61311C |
| 72 | Amplicon1460644 | 148067 | 400 | 400 | SNP | A | mo17 | G | b73:5CM1:LH82 | MRT4577_61311C |
| 72 | Amplicon1460644 | 148068 | 425 | 425 | SNP | C | mo17:LH82 | T | b73:5CM1 | MRT4577_61311C |
| 72 | Amplicon1460644 | 148069 | 433 | 433 | SNP | A | b73 | G | mo17:5CM1:LH82 | MRT4577_61311C |
| 73 | Amplicon1461872 | 151382 | 225 | 225 | SNP | A | b73:LH82 | C | 5CM1 | MRT4577_287993C |
| 73 | Amplicon1461872 | 151384 | 419 | 419 | SNP | C | 5CM1 | G | b73:LH82 | MRT4577_287993C |
| 73 | Amplicon1461872 | 151385 | 445 | 445 | SNP | C | b73:LH82 | G | 5CM1 | MRT4577_287993C |
| 73 | Amplicon1461872 | 151386 | 532 | 532 | SNP | A | b73:LH82 | T | 5CM1 | MRT4577_287993C |
| 73 | Amplicon1461872 | 151388 | 535 | 535 | IND | * | b73 | G | 5CM1:LH82 | MRT4577_287993C |
| 73 | Amplicon1461872 | 151389 | 535 | 537 | IND | *** | b73:LH82 | GCG | 5CM1 | MRT4577_287993C |
| 73 | Amplicon1461872 | 151390 | 540 | 544 | IND | ***** | b73:LH82 | TTGCC | 5CM1 | MRT4577_287993C |
| 73 | Amplicon1461872 | 151391 | 559 | 560 | IND | ** | LH82 | *A | | MRT4577_287993C |
| 73 | Amplicon1461872 | 151392 | 563 | 563 | IND | * | b73 | A | 5CM1:LH82 | MRT4577_287993C |
| 73 | Amplicon1461872 | 151393 | 569 | 569 | SNP | C | 5CM1 | G | b73:LH82 | MRT4577_287993C |
| 73 | Amplicon1461872 | 151396 | 639 | 641 | IND | *** | 5CM1 | GGC | b73:LH82 | MRT4577_287993C |
| 73 | Amplicon1461872 | 151397 | 643 | 643 | IND | * | 5CM1 | T | b73:LH82 | MRT4577_287993C |

[0216] TABLE 2

| SEQ NUM | Seq ID | Description |
|---|---|---|
| 74 | MRT4577_407583C | gene encoding MRT4577_407583P |
| 75 | MRT4577_37957C | gene encoding MRT4577_37957P |
| 76 | MRT4577_306229C | gene encoding MRT4577_306229P |
| 77 | MRT4577_305583C | gene encoding MRT4577_305583P |
| 78 | MRT4577_189292C | gene encoding MRT4577_189292P |
| 79 | MRT4577_409052C | gene encoding MRT4577_409052P |
| 80 | MRT4577_371170C | gene encoding MRT4577_371170P |
| 81 | MRT4577_169297C | gene encoding MRT4577_169297P |
| 82 | MRT4577_273665C | gene encoding MRT4577_273665P |
| 83 | MRT4577_285101C | gene encoding MRT4577_285101P |
| 84 | MRT4577_284415C | gene encoding MRT4577_284415P |
| 85 | MRT4577_38704C | gene encoding MRT4577_38704P |
| 86 | MRT4577_47332C | gene encoding MRT4577_47332P |
| 87 | MRT4577_386264C | gene encoding MRT4577_386264P |
| 88 | MRT4577_25879C | gene encoding MRT4577_25879P |
| 89 | MRT4577_419574C | gene encoding MRT4577_419574P |
| 90 | MRT4577_414575C | gene encoding MRT4577_414575P |
| 91 | MRT4577_199838C | gene encoding MRT4577_199838P |
| 92 | MRT4577_409604C | gene encoding MRT4577_409604P |
| 93 | MRT4577_391398C | gene encoding MRT4577_391398P |
| 94 | MRT4577_234188C | gene encoding MRT4577_234188P |
| 95 | MRT4577_264682C | gene encoding MRT4577_264682P |
| 96 | MRT4577_287055C | gene encoding MRT4577_287055P |
| 97 | MRT4577_49099C | gene encoding MRT4577_49099P |
| 98 | MRT4577_346921C | gene encoding MRT4577_346921P |
| 99 | MRT4577_257780C | gene encoding MRT4577_257780P |
| 100 | MRT4577_410376C | gene encoding MRT4577_410376P |
| 101 | MRT4577_233403C | gene encoding MRT4577_233403P |
| 102 | MRT4577_294774C | gene encoding MRT4577_294774P |
| 103 | MRT4577_402771C | gene encoding MRT4577_402771P |
| 104 | MRT4577_397598C | gene encoding MRT4577_397598P |
| 105 | MRT4577_204611C | gene encoding MRT4577_204611P |
| 106 | MRT4577_404797C | gene encoding MRT4577_404797P |
| 107 | MRT4577_32764C | gene encoding MRT4577_32764P |
| 108 | MRT4577_284905C | gene encoding MRT4577_284905P |
| 109 | MRT4577_386764C | gene encoding MRT4577_386764P |
| 110 | MRT4577_417745C | gene encoding MRT4577_417745P |
| 111 | MRT4577_43098C | gene encoding MRT4577_43098P |
| 112 | MRT4577_222465C | gene encoding MRT4577_222465P |
| 113 | MRT4577_326681C | gene encoding MRT4577_326681P |
| 114 | MRT4577_361986C | gene encoding MRT4577_361986P |
| 115 | MRT4577_418799C | gene encoding MRT4577_418799P |
| 116 | MRT4577_300134C | gene encoding MRT4577_300134P |
| 117 | MRT4577_415225C | gene encoding MRT4577_415225P |
| 118 | MRT4577_392856C | gene encoding MRT4577_392856P |
| 119 | MRT4577_56004C | gene encoding MRT4577_56004P |
| 120 | MRT4577_403109C | gene encoding MRT4577_403109P |
| 121 | MRT4577_221761C | gene encoding MRT4577_221761P |
| 122 | MRT4577_405424C | gene encoding MRT4577_405424P |
| 123 | MRT4577_401949C | gene encoding MRT4577_401949P |
| 124 | MRT4577_417394C | gene encoding MRT4577_417394P |
| 125 | MRT4577_213040C | gene encoding MRT4577_213040P |
| 126 | MRT4577_394773C | gene encoding MRT4577_394773P |
| 127 | MRT4577_26957C | gene encoding MRT4577_26957P |
| 128 | MRT4577_399958C | gene encoding MRT4577_399958P |
| 129 | MRT4577_401698C | gene encoding MRT4577_401698P |
| 130 | MRT4577_289436C | gene encoding MRT4577_289436P |
| 131 | MRT4577_221609C | gene encoding MRT4577_221609P |
| 132 | MRT4577_28967C | gene encoding MRT4577_28967P |
| 133 | MRT4577_151195C | gene encoding MRT4577_151195P |
| 134 | MRT4577_412840C | gene encoding MRT4577_412840P |
| 135 | MRT4577_45217C | gene encoding MRT4577_45217P |
| 136 | MRT4577_420096C | gene encoding MRT4577_420096P |
| 137 | MRT4577_220452C | gene encoding MRT4577_220452P |
| 138 | MRT4577_416979C | gene encoding MRT4577_416979P |
| 139 | MRT4577_5002C | gene encoding MRT4577_5002P |
| 140 | MRT4577_400334C | gene encoding MRT4577_400334P |
| 141 | MRT4577_400556C | gene encoding MRT4577_400556P |
| 142 | MRT4577_389607C | gene encoding MRT4577_389607P |
| 143 | MRT4577_405388C | gene encoding MRT4577_405388P |
| 144 | MRT4577_388272C | gene encoding MRT4577_388272P |
| 145 | MRT4577_61311C | gene encoding MRT4577_61311P |
| 146 | MRT4577_287993C | gene encoding MRT4577_287993P |

[0217] TABLE 3

| Seq Num | Seq ID | Description |
|---|---|---|
| 147 | MRT4577_407583P | /method = simple longest ORF |
| 148 | MRT4577_37957P | gl\|22758323\|gb\|AAN05527.1\|putative glutamine synthetase |
| | | [Oryza sativa (japonica cultivar-group)]/method = extended homology |
| 149 | MRT4577_306229P | gl\|18767126\|gb\|AAL79278.1\|/method = extended homology |
| 150 | MRT4577_305583P | gl\|28566182\|gb\|AAO43227.1\|phosphoethanolamine |
| | | cytidylyltransferase |
| | | [Hordeum vulgare subsp. vulgare]/method = extended homology |
| 151 | MRT4577_189292P | gl\|22094360\|gb\|AAM91887.1\|putative cytokinin oxidase [Oryza sativa |
| | | (japonica cultivar-group)]/method = homology |
| 152 | MRT4577_409052P | gl\|18568267\|gb\|AAL75999.1\|AF466646_7 putative polyprotein |
| | | [Zea mays]/method = extended homology |
| 153 | MRT4577_371170P | gl\|7339715\|dbj\|BAA92920.1\|EST AU057816(S21817) |
| | | corresponds to a reglon |
| | | of the predicted gene. Similar to Arabidopsis |
| | | thaliana chromosome IV BAC T19F06; |
| | | unknown protein. (AC002343) |
| | | [Oryza sativa]/method = extended homology |
| 154 | MRT4577_169297P | gl\|22325962\|ref\|NP_180419.2\|putative vacuolar |
| | | proton-ATPase subunit; protein id: At2g28520.1, |
| | | supported by cDNA: gl_20259418 [Arabidopsis thaliana]/ |
| | | method = extended homology |
| 155 | MRT4577_273665P | gl\|25408357\|pir\|\|C84765 / |
| | | method = extended homology |
| 156 | MRT4577_285101P | gl\|28971970\|dbj\|BAC65371.1\|putative |
| | | cellulose synthase [Oryza sativa (japonica |
| | | cultivar-group)]/method = extended homology |
| 157 | MRT4577_284415P | gl\|18416861\|ref\|NP_568276.1\|/ |
| | | method = extended homology |
| 158 | MRT4577_38704P | gl\|15242264\|ref\|NP_200017.1\|/ |
| | | method = extended homology |
| 159 | MRT4577_47332P | gl\|18404228\|ref\|NP_566752.1\| |
| | | rubisco expression protein -related [Arabidopsis |
| | | thaliana]/method = extended homology |
| 160 | MRT4577_386264P | gl\|6539568\|dbj\|BAA88185.1\|/ |
| | | method = extended homology |
| 161 | MRT4577_25879P | gl\|15236196\|ref\|NP_194375.1\|/ |
| | | method = extended homology |
| 162 | MRT4577_419574P | /method = simple longest ORF |
| 163 | MRT4577_414575P | /method = longest ORF |
| 164 | MRT4577_199838P | gl\|7487920\|pir\|\|T01025 / |
| | | method = extended homology |
| 165 | MRT4577_409604P | /method = simple longest ORF |
| 166 | MRT4577_391398P | gl\|21740740\|emb\|CAD40549.1\|OSJNBa0072K14.5 |
| | | [Oryza sativa]/method = extended homology |
| 167 | MRT4577_234188P | gl\|5679845\|emb\|CAB51838.1\|/ |
| | | method = extended homology |
| 168 | MRT4577_264682P | gl\|28392860\|gb\|AA041867.1\|/ |
| | | method = extended homology |
| 169 | MRT4577_287055P | gl\|20161246\|dbj\|BAB90173.1\| |
| | | putative ATP-dependent Clp protease regulatory |
| | | subunit CLPX [Oryza sativa (japonica cultivar- |
| | | group)]/method = extended homology |
| 170 | MRT4577_49099P | gl\|137460\|sp\|P09469\|VATA_DAUCA |
| | | VACUOLAR ATP SYNTHASE CATALYTIC SUBUNIT A |
| | | (V-ATPASE A SUBUNIT) (VACUOLAR PROTON PUMP |
| | | ALPHA SUBUNIT) (V-ATPASE 69 KDA SUBUNIT). / |
| | | method = extended homology |
| 171 | MRT4577_346921P | gl\|29372756\|emb\|CAD23413.1\| |
| | | m23 [Zea mays]/method = extended homology |
| 172 | MRT4577_257780P | gl\|15232453\|ref\|NP_188116.1\| |
| | | PHD finger transcription factor, putative |
| | | [Arabidopsis thaliana]/method = extended |
| | | homology |
| 173 | MRT4577_410376P | /method = simple longest ORF |
| 174 | MRT4577_233403P | /method = longest ORF |
| 175 | MRT4577_294774P | gl\|22265999\|emb\|CAC82980.1\| |
| | | fatty acid hydroperoxide lyase [Hordeum vulgare]/ |
| | | method = extended homology |
| 176 | MRT4577_402771P | /method = longest ORF |
| 177 | MRT4577_397598P | gl\|13486777\|dbj\|BAB40010.1\| |
| | | putative wall-associated kinase 2 [Oryza sativa |
| | | (japonica cultivar-group)]/method = homology |
| 178 | MRT4577_204611P | gl\|15866696\|emb\|CAC84558.1\|beta-amyrin |
| | | synthase [Avena strigosa]/method = extended homology |
| 179 | MRT4577_404797P | /method = simple longest ORF |
| 180 | MRT4577_32764P | gl\|18396768\|ref\|NP_564307.1\| |
| | | expressed protein [Arabidopsis thaliana]/ |
| | | method = extended homology |
| 181 | MRT4577_284905P | gl\|22748323\|gb\|AAN05325.1\|/ |
| | | method = extended homology |
| 182 | MRT4577_386764P | gl\|22330199\|ref\|NP_683423.1\| |
| | | somatic embryogenesis receptor-like kinase, |
| | | putative; protein id: At1g52540.2, supported |
| | | by cDNA: 21250. [Arabidopsis thaliana]/ |
| | | method = extended homology |
| 183 | MRT4577_417745P | /method = longest ORF |
| 184 | MRT4577_43098P | gl\|29893654\|gb\|AAP06908.1\|/ |
| | | method = extended homology |
| 185 | MRT4577_222465P | gl\|14587221\|db\|BAB61155.1\|/ |
| | | method = extended homology |
| 186 | MRT4577_326681P | gl\|28071332\|db\|BAC56020.1\| |
| | | putative RNA helicase [Oryza sativa |
| | | (japonica cultivar-group)]/ |
| | | method = extended homology |
| 187 | MRT4577_361986P | gl\|15227441\|ref\|NP_181713.1\|/ |
| | | method = homology |
| 188 | MRT4577_418799P | /method = simple longest ORF |
| 189 | MRT4577_300134P | gl\|7489733\|pir\|\|T01171G1/ |
| | | S transition control protein Rb1 - |
| | | maize /method = extended homology |
| 190 | MRT4577_415225P | gl\|15239966\|ref\|NP_196804.1\| |
| | | callose synthase catalytic subunit - |
| | | like protein [Arabidopsis thaliana]/ |
| | | method = extended homology |
| 191 | MRT4577_392856P | gl\|22135459\|gb\|AAM93210.1\| |
| | | AF527609_1 chromdomain-containing |
| | | protein CRD101 [Zea mays]/ |
| | | method = extended homology |
| 192 | MRT4577_56004P | gl\|18415638\|ref\|NP_567620.1\| |
| | | zinc finger and C2 domain protein |
| | | (ZAC) [Arabidopsis thaliana]/ |
| | | method = extended homology |
| 193 | MRT4577_403109P | /method = simple longest ORF |
| 194 | MRT4577_221761P | gl\|22331664\|ref\|NP_190399.2\| |
| | | DP-E2F-like protein 1; protein id: |
| | | At3g48160.1, supported by cDNA: |
| | | gl_20502507 [Arabidopsis thaliana]/ |
| | | method = extended homology |
| 195 | MRT4577_405424P | /method = longest ORF |
| 196 | MRT4577_401949P | gl\|15209148\|gb\|AAK91881.1\| |
| | | AC091665_7 /method = homology |
| 197 | MRT4577_417394P | /method = longest ORF |
| 198 | MRT4577_213040P | /method = longest ORF |
| 199 | MRT4577_394773P | /method = longest ORF |
| 200 | MRT4577_26957P | gl\|18407057\|ref\|NP_566071.1\|/ |
| | | method = extended homology |
| 201 | MRT4577_399958P | /method = simple longest ORF |
| 202 | MRT4577_401698P | /method = longest ORF |
| 203 | MRT4577_289436P | gl\|24413957\|db\|BAC22209.1\|/ |
| | | method = extended homology |
| 204 | MRT4577_221609P | gl\|20160716\|db\|BAB89658.1\|/ |
| | | method = extended homology |
| 205 | MRT4577_28967P | gl\|9663979\|db\|BAB03620.1\|/ |
| | | method = homology |
| 206 | MRT4577_151195P | /method = simple longest ORF |
| 207 | MRT4577_412840P | /method = simple longest ORF |
| 208 | MRT4577_45217P | gl\|19352035\|db\|BAB85911.1\| |
| | | Arabidopsis ETTIN-like protein 2 |
| | | [Oryza sativa]/method = homology |
| 209 | MRT4577_420096P | gl\|20330751\|gb\|AAM19114.1\| |
| | | AC104427_12 Putative bZIP |
| | | transcription factor [Oryza sativa |
| | | (japonica cultivar-group)]/ |
| | | method = extended homology |
| 210 | MRT4577_220452P | gl\|26449867\|db\|BAC42056.1\|/ |
| | | method = extended homology |
| 211 | MRT4577_416979P | /method = longest ORF |
| 212 | MRT4577_5002P | gl\|7489518\|pir\|\|T02745 nucleic |
| | | acid binding protein - |
| | | rice /method = extended homology |
| 213 | MRT4577_400334P | /method = simple longest ORF |
| 214 | MRT4577_400556P | /method = simple longest ORF |
| 215 | MRT4577_389607P | gl\|20161442\|db\|BAB90366.1\|/ |
| | | method = extended homology |
| 216 | MRT4577_405388P | gl\|1703302\|sp\|P55005\|AMYB_MAIZE |
| | | “BETA-AMYLASE (1,4-ALPHA-D-GLUCAN |
| | | MALTOHYDROLASE)./ |
| | | method = extended homology” |
| 217 | MRT4577_388272P | gl\|7488484\|pir\|\|T07980 |
| | | probable choline-phosphate cytidylyltransferase |
| | | (EC 2.7.7.15) (clone CCT2) - |
| | | rape /method = extended homology |
| 218 | MRT4577_61311P | gl\|7489748\|pir\|\|T03381 high |
| | | sulfurzein protein precursor - |
| | | maize /method = homology |
| 219 | MRT4577_287993P | gl\|11993325\|gb\|AAG42687.1\|AF271383_1 Zea |
| | | mays indole-3-glycerol phosphate lyase (Igl) |
| | | gene, complete cds; and putative tryptophan |
| | | synthase alpha (TSAlike) gene, partial cds./ |
| | | method = homology |

[0218] TABLE 4

| Seq_Num | Seq_ID | Homolog_ID |
|---|---|---|
| 148 | MRT4577_37957P | gl_21220152 |
| 148 | MRT4577_37957P | gl_21219634 |
| 148 | MRT4577_37957P | gl_21220814 |
| 148 | MRT4577_37957P | gl_17227784 |
| 148 | MRT4577_37957P | gl_17232340 |
| 148 | MRT4577_37957P | gl_22960297 |
| 148 | MRT4577_37957P | gl_22957596 |
| 148 | MRT4577_37957P | gl_22961512 |
| 148 | MRT4577_37957P | gl_22961554 |
| 148 | MRT4577_37957P | gl_22962442 |
| 148 | MRT4577_37957P | gl_22966395 |
| 148 | MRT4577_37957P | gl_16330288 |
| 148 | MRT4577_37957P | gl_32476398 |
| 148 | MRT4577_37957P | gl_22993136 |
| 148 | MRT4577_37957P | gl_22991262 |
| 148 | MRT4577_37957P | gl_22993311 |
| 148 | MRT4577_37957P | gl_15673109 |
| 148 | MRT4577_37957P | gl_15893448 |
| 148 | MRT4577_37957P | gl_15893920 |
| 148 | MRT4577_37957P | gl_26988777 |
| 148 | MRT4577_37957P | gl_16801989 |
| 148 | MRT4577_37957P | gl_2500204 |
| 148 | MRT4577_37957P | gl_16804835 |
| 148 | MRT4577_37957P | gl_27468813 |
| 148 | MRT4577_37957P | gl_15827378 |
| 148 | MRT4577_37957P | gl_15890531 |
| 148 | MRT4577_37957P | gl_23006404 |
| 148 | MRT4577_37957P | gl_23004108 |
| 148 | MRT4577_37957P | gl_16126335 |
| 148 | MRT4577_37957P | gl_16124956 |
| 148 | MRT4577_37957P | gl_18309257 |
| 148 | MRT4577_37957P | gl_19552720 |
| 148 | MRT4577_37957P | gl_19553182 |
| 148 | MRT4577_37957P | gl_23019853 |
| 148 | MRT4577_37957P | gl_23019267 |
| 148 | MRT4577_37957P | gl_23021869 |
| 148 | MRT4577_37957P | gl_23021249 |
| 148 | MRT4577_37957P | gl_23021813 |
| 148 | MRT4577_37957P | gl_23028929 |
| 148 | MRT4577_37957P | gl_23501390 |
| 148 | MRT4577_37957P | gl_23336124 |
| 148 | MRT4577_37957P | gl_23465101 |
| 148 | MRT4577_37957P | gl_23465609 |
| 148 | MRT4577_37957P | gl_23473416 |
| 148 | MRT4577_37957P | gl_22536365 |
| 148 | MRT4577_37957P | gl_15595759 |
| 148 | MRT4577_37957P | gl_15597263 |
| 148 | MRT4577_37957P | gl_15829106 |
| 148 | MRT4577_37957P | gl_28209952 |
| 148 | MRT4577_37957P | gl_28210965 |
| 148 | MRT4577_37957P | gl_27367975 |
| 148 | MRT4577_37957P | gl_28379494 |
| 148 | MRT4577_37957P | gl_23099057 |
| 148 | MRT4577_37957P | gl_28901282 |
| 148 | MRT4577_37957P | gl_16077989 |
| 148 | MRT4577_37957P | gl_17987729 |
| 148 | MRT4577_37957P | gl_29375007 |
| 148 | MRT4577_37957P | gl_29347953 |
| 148 | MRT4577_37957P | gl_29828077 |
| 148 | MRT4577_37957P | gl_29833210 |
| 148 | MRT4577_37957P | gl_15897407 |
| 148 | MRT4577_37957P | gl_27262322 |
| 148 | MRT4577_37957P | gl_23102311 |
| 148 | MRT4577_37957P | gl_23106149 |
| 148 | MRT4577_37957P | gl_30102526 |
| 148 | MRT4577_37957P | gl_15234470 |
| 148 | MRT4577_37957P | gl_13474110 |
| 148 | MRT4577_37957P | gl_15966192 |
| 148 | MRT4577_37957P | MRT3847_53577P.3 |
| 148 | MRT4577_37957P | MRT3847_267642P.1 |
| 148 | MRT4577_37957P | gl_22758323 |
| 148 | MRT4577_37957P | gl_19881629 |
| 148 | MRT4577_37957P | gl_5881832 |
| 148 | MRT4577_37957P | MRT4530_14454P.2 |
| 148 | MRT4577_37957P | MRT4530_14452P.1 |
| 148 | MRT4577_37957P | MRT4565_134443P.1 |
| 148 | MRT4577_37957P | MRT4565_41750P.3 |
| 148 | MRT4577_37957P | gl_19075895 |
| 148 | MRT4577_37957P | gl_6320442 |
| 148 | MRT4577_37957P | gl_23118917 |
| 148 | MRT4577_37957P | gl_32405352 |
| 148 | MRT4577_37957P | gl_23123201 |
| 148 | MRT4577_37957P | gl_15600873 |
| 148 | MRT4577_37957P | gl_23131072 |
| 148 | MRT4577_37957P | gl_15609923 |
| 148 | MRT4577_37957P | gl_15616426 |
| 148 | MRT4577_37957P | gl_16761259 |
| 148 | MRT4577_37957P | gl_23135856 |
| 148 | MRT4577_37957P | gl_16765661 |
| 149 | MRT4577_306229P | MRT3847_254592P.2 |
| 149 | MRT4577_306229P | MRT3847_234305P.2 |
| 149 | MRT4577_306229P | MRT3847_213371P.3 |
| 149 | MRT4577_306229P | MRT3847_223708P.3 |
| 149 | MRT4577_306229P | MRT4565_71415P.2 |
| 150 | MRT4577_305583P | gl_28566182 |
| 150 | MRT4577_305583P | gl_15224925 |
| 150 | MRT4577_305583P | MRT3847_284135P.1 |
| 150 | MRT4577_305583P | MRT3847_52222P.3 |
| 150 | MRT4577_305583P | MRT4530_21638P.2 |
| 150 | MRT4577_305583P | MRT4530_21634P.2 |
| 150 | MRT4577_305583P | MRT4530_21629P.1 |
| 150 | MRT4577_305583P | MRT4565_98294P.2 |
| 151 | MRT4577_189292P | gl_17227820 |
| 151 | MRT4577_189292P | gl_28192488 |
| 151 | MRT4577_189292P | gl_1169648 |
| 151 | MRT4577_189292P | gl_22094360 |
| 151 | MRT4577_189292P | gl_32489847 |
| 151 | MRT4577_189292P | MRT4530_25301P.1 |
| 151 | MRT4577_189292P | MRT4565_4354P.3 |
| 152 | MRT4577_409052P | gl_19881581 |
| 153 | MRT4577_371170P | gl_15233656 |
| 153 | MRT4577_371170P | gl_28973727 |
| 153 | MRT4577_371170P | gl_6633813 |
| 153 | MRT4577_371170P | gl_20259460 |
| 153 | MRT4577_371170P | gl_15217662 |
| 153 | MRT4577_371170P | MRT3847_24864P.2 |
| 153 | MRT4577_371170P | MRT3847_99459P.3 |
| 153 | MRT4577_371170P | gl_7339715 |
| 153 | MRT4577_371170P | MRT4530_100337P.1 |
| 153 | MRT4577_371170P | MRT4530_100340P.1 |
| 153 | MRT4577_371170P | MRT4530_146073P.1 |
| 153 | MRT4577_371170P | MRT4565_66175P.2 |
| 154 | MRT4577_169297P | gl_15027611 |
| 154 | MRT4577_169297P | gl_25956266 |
| 154 | MRT4577_169297P | gl_27125515 |
| 154 | MRT4577_169297P | MRT4530_37728P.2 |
| 154 | MRT4577_169297P | MRT4530_37726P.2 |
| 154 | MRT4577_169297P | gl_18657017 |
| 154 | MRT4577_169297P | MRT4530_71260P.2 |
| 154 | MRT4577_169297P | MRT4530_37730P.2 |
| 154 | MRT4577_169297P | gl_19115131 |
| 154 | MRT4577_169297P | gl_460160 |
| 154 | MRT4577_169297P | gl_6323699 |
| 154 | MRT4577_169297P | gl_264676 |
| 154 | MRT4577_169297P | gl_6324844 |
| 154 | MRT4577_169297P | gl_32404216 |
| 155 | MRT4577_273665P | gl_21741785 |
| 155 | MRT4577_273665P | MRT4565_57148P.3 |
| 156 | MRT4577_285101P | gl_21954719 |
| 156 | MRT4577_285101P | gl_21954721 |
| 156 | MRT4577_285101P | gl_27372782 |
| 156 | MRT4577_285101P | MRT3847_200246P.2 |
| 157 | MRT4577_284415P | gl_14586373 |
| 157 | MRT4577_284415P | gl_30684104 |
| 157 | MRT4577_284415P | gl_15591909 |
| 157 | MRT4577_284415P | gl_30688675 |
| 157 | MRT4577_284415P | gl_17065024 |
| 157 | MRT4577_284415P | gl_7487603 |
| 157 | MRT4577_284415P | MRT3847_26155P.3 |
| 157 | MRT4577_284415P | MRT3847_98076P.3 |
| 157 | MRT4577_284415P | MRT3847_98062P.3 |
| 157 | MRT4577_284415P | MRT3847_11589P.3 |
| 157 | MRT4577_284415P | MRT4530_46211P.2 |
| 157 | MRT4577_284415P | MRT4530_46208P.1 |
| 157 | MRT4577_284415P | MRT4565_9346P.3 |
| 158 | MRT4577_38704P | gl_30696140 |
| 158 | MRT4577_38704P | gl_30696138 |
| 158 | MRT4577_38704P | gl_1707370 |
| 158 | MRT4577_38704P | gl_15235112 |
| 158 | MRT4577_38704P | gl_25386572 |
| 158 | MRT4577_38704P | gl_1667582 |
| 158 | MRT4577_38704P | MRT3847_258276P.2 |
| 158 | MRT4577_38704P | MRT3847_61998P.3 |
| 158 | MRT4577_38704P | MRT3847_63803P.3 |
| 158 | MRT4577_38704P | MRT3847_250868P.2 |
| 158 | MRT4577_38704P | MRT4530_27655P.2 |
| 158 | MRT4577_38704P | gl_6759507 |
| 159 | MRT4577_47332P | gl_21219540 |
| 159 | MRT4577_47332P | gl_21219937 |
| 159 | MRT4577_47332P | gl_17231725 |
| 159 | MRT4577_47332P | gl_22960295 |
| 159 | MRT4577_47332P | gl_3913209 |
| 159 | MRT4577_47332P | gl_22963535 |
| 159 | MRT4577_47332P | gl_32475580 |
| 159 | MRT4577_47332P | gl_20807813 |
| 159 | MRT4577_47332P | gl_14194485 |
| 159 | MRT4577_47332P | gl_22989508 |
| 159 | MRT4577_47332P | gl_2462107 |
| 159 | MRT4577_47332P | gl_2462109 |
| 159 | MRT4577_47332P | gl_6016879 |
| 159 | MRT4577_47332P | gl_6016881 |
| 159 | MRT4577_47332P | gl_98485 |
| 159 | MRT4577_47332P | gl_15828368 |
| 159 | MRT4577_47332P | gl_15826905 |
| 159 | MRT4577_47332P | gl_15827806 |
| 159 | MRT4577_47332P | gl_21401687 |
| 159 | MRT4577_47332P | gl_18310529 |
| 159 | MRT4577_47332P | gl_30263713 |
| 159 | MRT4577_47332P | gl_23017722 |
| 159 | MRT4577_47332P | gl_23043296 |
| 159 | MRT4577_47332P | gl_23099102 |
| 159 | MRT4577_47332P | gl_16078805 |
| 159 | MRT4577_47332P | gl_27377698 |
| 159 | MRT4577_47332P | gl_29827972 |
| 159 | MRT4577_47332P | gl_29828741 |
| 159 | MRT4577_47332P | gl_29833453 |
| 159 | MRT4577_47332P | gl_3913225 |
| 159 | MRT4577_47332P | gl_11465473 |
| 159 | MRT4577_47332P | gl_11465694 |
| 159 | MRT4577_47332P | gl_116144 |
| 159 | MRT4577_47332P | gl_11467528 |
| 159 | MRT4577_47332P | gl_18404228 |
| 159 | MRT4577_47332P | gl_21553510 |
| 159 | MRT4577_47332P | gl_9294047 |
| 159 | MRT4577_47332P | gl_24559828 |
| 159 | MRT4577_47332P | gl_16263937 |
| 159 | MRT4577_47332P | MRT3847_41566P.3 |
| 159 | MRT4577_47332P | MRT3847_25290P.2 |
| 159 | MRT4577_47332P | MRT3847_16287P.3 |
| 159 | MRT4577_47332P | MRT3847_212021P.2 |
| 159 | MRT4577_47332P | MRT3847_218049P.2 |
| 159 | MRT4577_47332P | gl_8489192 |
| 159 | MRT4577_47332P | gl_30468060 |
| 159 | MRT4577_47332P | gl_2541885 |
| 159 | MRT4577_47332P | MRT4530_15443P.1 |
| 159 | MRT4577_47332P | MRT4530_104183P.1 |
| 159 | MRT4577_47332P | MRT4530_143108P.1 |
| 159 | MRT4577_47332P | MRT4530_111094P.1 |
| 159 | MRT4577_47332P | MRT4565_130085P.1 |
| 159 | MRT4577_47332P | MRT4565_8769P.3 |
| 159 | MRT4577_47332P | gl_23112455 |
| 159 | MRT4577_47332P | gl_23111662 |
| 159 | MRT4577_47332P | gl_729237 |
| 159 | MRT4577_47332P | gl_420929 |
| 159 | MRT4577_47332P | gl_729238 |
| 159 | MRT4577_47332P | gl_11467655 |
| 159 | MRT4577_47332P | gl_13812343 |
| 159 | MRT4577_47332P | gl_23131734 |
| 159 | MRT4577_47332P | gl_15839668 |
| 159 | MRT4577_47332P | gl_15843516 |
| 159 | MRT4577_47332P | gl_15607423 |
| 159 | MRT4577_47332P | gl_15611004 |
| 159 | MRT4577_47332P | gl_15611020 |
| 159 | MRT4577_47332P | gl_15608935 |
| 159 | MRT4577_47332P | gl_23134144 |
| 159 | MRT4577_47332P | gl_15614926 |
| 159 | MRT4577_47332P | gl_15614852 |
| 160 | MRT4577_386264P | gl_21223783 |
| 160 | MRT4577_386264P | gl_21220496 |
| 160 | MRT4577_386264P | gl_15616928 |
| 160 | MRT4577_386264P | gl_22968361 |
| 160 | MRT4577_386264P | gl_22970242 |
| 160 | MRT4577_386264P | gl_15921917 |
| 160 | MRT4577_386264P | gl_15618021 |
| 160 | MRT4577_386264P | gl_32476350 |
| 160 | MRT4577_386264P | gl_20808232 |
| 160 | MRT4577_386264P | gl_22980706 |
| 160 | MRT4577_386264P | gl_15676021 |
| 160 | MRT4577_386264P | gl_15793205 |
| 160 | MRT4577_386264P | gl_15807615 |
| 160 | MRT4577_386264P | gl_6708108 |
| 160 | MRT4577_386264P | gl_22988101 |
| 160 | MRT4577_386264P | gl_22990852 |
| 160 | MRT4577_386264P | gl_421428 |
| 160 | MRT4577_386264P | gl_15673314 |
| 160 | MRT4577_386264P | gl_1730064 |
| 160 | MRT4577_386264P | gl_14289139 |
| 160 | MRT4577_386264P | gl_585371 |
| 160 | MRT4577_386264P | gl_282382 |
| 160 | MRT4577_386264P | gl_3041863 |
| 160 | MRT4577_386264P | gl_30724884 |
| 160 | MRT4577_386264P | gl_1730065 |
| 160 | MRT4577_386264P | gl_15894323 |
| 160 | MRT4577_386264P | gl_15893809 |
| 160 | MRT4577_386264P | gl_15802088 |
| 160 | MRT4577_386264P | gl_23000680 |
| 160 | MRT4577_386264P | gl_1346399 |
| 160 | MRT4577_386264P | gl_15924687 |
| 160 | MRT4577_386264P | gl_23002842 |
| 160 | MRT4577_386264P | gl_15675235 |
| 160 | MRT4577_386264P | gl_15837426 |
| 160 | MRT4577_386264P | gl_125607 |
| 160 | MRT4577_386264P | gl_16800673 |
| 160 | MRT4577_386264P | gl_33240373 |
| 160 | MRT4577_386264P | gl_16803610 |
| 160 | MRT4577_386264P | gl_15900780 |
| 160 | MRT4577_386264P | gl_27468291 |
| 160 | MRT4577_386264P | gl_3122320 |
| 160 | MRT4577_386264P | gl_15827659 |
| 160 | MRT4577_386264P | gl_18312204 |
| 160 | MRT4577_386264P | gl_15891188 |
| 160 | MRT4577_386264P | gl_20092686 |
| 160 | MRT4577_386264P | gl_19705084 |
| 160 | MRT4577_386264P | gl_21232615 |
| 160 | MRT4577_386264P | gl_21244070 |
| 160 | MRT4577_386264P | gl_16126292 |
| 160 | MRT4577_386264P | gl_21402641 |
| 160 | MRT4577_386264P | gl_15791759 |
| 160 | MRT4577_386264P | gl_21226817 |
| 160 | MRT4577_386264P | gl_18311131 |
| 160 | MRT4577_386264P | gl_18309344 |
| 160 | MRT4577_386264P | gl_25028545 |
| 160 | MRT4577_386264P | gl_23308892 |
| 160 | MRT4577_386264P | gl_22299818 |
| 160 | MRT4577_386264P | gl_22298059 |
| 160 | MRT4577_386264P | gl_24113065 |
| 160 | MRT4577_386264P | gl_30063190 |
| 160 | MRT4577_386264P | gl_21910448 |
| 160 | MRT4577_386264P | gl_21672587 |
| 160 | MRT4577_386264P | gl_26247926 |
| 160 | MRT4577_386264P | gl_23017104 |
| 160 | MRT4577_386264P | gl_23023645 |
| 160 | MRT4577_386264P | gl_23029594 |
| 160 | MRT4577_386264P | gl_23037947 |
| 160 | MRT4577_386264P | gl_28493257 |
| 160 | MRT4577_386264P | gl_23502605 |
| 160 | MRT4577_386264P | gl_23336674 |
| 160 | MRT4577_386264P | gl_23466988 |
| 160 | MRT4577_386264P | gl_23059426 |
| 160 | MRT4577_386264P | gl_23063854 |
| 160 | MRT4577_386264P | gl_23465557 |
| 160 | MRT4577_386264P | gl_23475131 |
| 160 | MRT4577_386264P | gl_22537102 |
| 160 | MRT4577_386264P | gl_32039540 |
| 160 | MRT4577_386264P | gl_15596695 |
| 160 | MRT4577_386264P | gl_12045070 |
| 160 | MRT4577_386264P | gl_407635 |
| 160 | MRT4577_386264P | gl_27887626 |
| 160 | MRT4577_386264P | gl_24379618 |
| 160 | MRT4577_386264P | gl_13508042 |
| 160 | MRT4577_386264P | gl_15828711 |
| 160 | MRT4577_386264P | gl_25010985 |
| 160 | MRT4577_386264P | gl_24374035 |
| 160 | MRT4577_386264P | gl_28212071 |
| 160 | MRT4577_386264P | gl_13357744 |
| 160 | MRT4577_386264P | gl_16122616 |
| 160 | MRT4577_386264P | gl_16122303 |
| 160 | MRT4577_386264P | gl_27364101 |
| 160 | MRT4577_386264P | gl_27366266 |
| 160 | MRT4577_386264P | gl_28572631 |
| 160 | MRT4577_386264P | gl_15668279 |
| 160 | MRT4577_386264P | gl_28378548 |
| 160 | MRT4577_386264P | gl_23052059 |
| 160 | MRT4577_386264P | gl_23099626 |
| 160 | MRT4577_386264P | gl_28897130 |
| 160 | MRT4577_386264P | gl_28898813 |
| 160 | MRT4577_386264P | gl_28900678 |
| 160 | MRT4577_386264P | gl_16079970 |
| 160 | MRT4577_386264P | gl_15594693 |
| 160 | MRT4577_386264P | gl_17986575 |
| 160 | MRT4577_386264P | gl_27904791 |
| 160 | MRT4577_386264P | gl_29375625 |
| 160 | MRT4577_386264P | gl_29348250 |
| 160 | MRT4577_386264P | gl_30022674 |
| 160 | MRT4577_386264P | gl_6318287 |
| 160 | MRT4577_386264P | gl_29655069 |
| 160 | MRT4577_386264P | gl_29832759 |
| 160 | MRT4577_386264P | gl_29829367 |
| 160 | MRT4577_386264P | gl_32034452 |
| 160 | MRT4577_386264P | gl_32029324 |
| 160 | MRT4577_386264P | gl_15897860 |
| 160 | MRT4577_386264P | gl_16081945 |
| 160 | MRT4577_386264P | gl_155435 |
| 160 | MRT4577_386264P | gl_28564203 |
| 160 | MRT4577_386264P | gl_28564205 |
| 160 | MRT4577_386264P | gl_26553530 |
| 160 | MRT4577_386264P | gl_23055438 |
| 160 | MRT4577_386264P | gl_28565038 |
| 160 | MRT4577_386264P | gl_25005270 |
| 160 | MRT4577_386264P | gl_7861547 |
| 160 | MRT4577_386264P | gl_4433778 |
| 160 | MRT4577_386264P | gl_17549667 |
| 160 | MRT4577_386264P | gl_17545291 |
| 160 | MRT4577_386264P | gl_32490885 |
| 160 | MRT4577_386264P | gl_15241190 |
| 160 | MRT4577_386264P | gl_15236190 |
| 160 | MRT4577_386264P | gl_4033432 |
| 160 | MRT4577_386264P | gl_4033435 |
| 160 | MRT4577_386264P | gl_13473275 |
| 160 | MRT4577_386264P | gl_15966542 |
| 160 | MRT4577_386264P | gl_4586602 |
| 160 | MRT4577_386264P | gl_20465197 |
| 160 | MRT4577_386264P | gl_2497540 |
| 160 | MRT4577_386264P | gl_6539568 |
| 160 | MRT4577_386264P | gl_3122311 |
| 160 | MRT4577_386264P | gl_2497543 |
| 160 | MRT4577_386264P | gl_25814821 |
| 160 | MRT4577_386264P | gl_322787 |
| 160 | MRT4577_386264P | gl_125606 |
| 160 | MRT4577_386264P | MRT4530_57792P.1 |
| 160 | MRT4577_386264P | MRT4530_27060P.2 |
| 160 | MRT4577_386264P | MRT4530_27056P.1 |
| 160 | MRT4577_386264P | MRT4565_39839P.3 |
| 160 | MRT4577_386264P | MRT4565_140767P.1 |
| 160 | MRT4577_386264P | gl_7271955 |
| 160 | MRT4577_386264P | gl_23110381 |
| 160 | MRT4577_386264P | gl_19115258 |
| 160 | MRT4577_386264P | gl_11260405 |
| 160 | MRT4577_386264P | gl_28563985 |
| 160 | MRT4577_386264P | gl_28563989 |
| 160 | MRT4577_386264P | gl_28563987 |
| 160 | MRT4577_386264P | gl_6319279 |
| 160 | MRT4577_386264P | gl_6324923 |
| 160 | MRT4577_386264P | gl_4180 |
| 160 | MRT4577_386264P | gl_23121268 |
| 160 | MRT4577_386264P | gl_28564948 |
| 160 | MRT4577_386264P | gl_101735 |
| 160 | MRT4577_386264P | gl_1170699 |
| 160 | MRT4577_386264P | gl_13541851 |
| 160 | MRT4577_386264P | gl_2497537 |
| 160 | MRT4577_386264P | gl_320885 |
| 160 | MRT4577_386264P | gl_9955873 |
| 160 | MRT4577_386264P | gl_32410899 |
| 160 | MRT4577_386264P | gl_400142 |
| 160 | MRT4577_386264P | gl_5911463 |
| 160 | MRT4577_386264P | gl_12643655 |
| 160 | MRT4577_386264P | gl_3377757 |
| 160 | MRT4577_386264P | gl_147276 |
| 160 | MRT4577_386264P | gl_1310978 |
| 160 | MRT4577_386264P | gl_9955371 |
| 160 | MRT4577_386264P | gl_9955367 |
| 160 | MRT4577_386264P | gl_1805530 |
| 160 | MRT4577_386264P | gl_1742753 |
| 160 | MRT4577_386264P | gl_14600753 |
| 160 | MRT4577_386264P | gl_23122758 |
| 160 | MRT4577_386264P | gl_1526982 |
| 160 | MRT4577_386264P | gl_4033428 |
| 160 | MRT4577_386264P | gl_15640512 |
| 160 | MRT4577_386264P | gl_15642010 |
| 160 | MRT4577_386264P | gl_15601464 |
| 160 | MRT4577_386264P | gl_16273468 |
| 160 | MRT4577_386264P | gl_23131322 |
| 160 | MRT4577_386264P | gl_15602518 |
| 160 | MRT4577_386264P | gl_15605055 |
| 160 | MRT4577_386264P | gl_1791247 |
| 160 | MRT4577_386264P | gl_15608755 |
| 160 | MRT4577_386264P | gl_16129807 |
| 160 | MRT4577_386264P | gl_15831818 |
| 160 | MRT4577_386264P | gl_15835226 |
| 160 | MRT4577_386264P | gl_23133806 |
| 160 | MRT4577_386264P | gl_15615725 |
| 160 | MRT4577_386264P | gl_16760530 |
| 160 | MRT4577_386264P | gl_6691650 |
| 160 | MRT4577_386264P | gl_6729356 |
| 160 | MRT4577_386264P | gl_23135446 |
| 160 | MRT4577_386264P | gl_16764728 |
| 161 | MRT4577_25879P | gl_15236196 |
| 161 | MRT4577_25879P | MRT3847_13189P.3 |
| 161 | MRT4577_25879P | MRT3847_42675P.2 |
| 161 | MRT4577_25879P | gl_32488077 |
| 161 | MRT4577_25879P | MRT4530_10024P.1 |
| 161 | MRT4577_25879P | MRT4530_10021P.1 |
| 161 | MRT4577_25879P | MRT4565_78273P.2 |
| 164 | MRT4577_199838P | MRT3847_233523P.2 |
| 166 | MRT4577_391398P | MRT3847_36848P.3 |
| 166 | MRT4577_391398P | MRT3847_43842P.3 |
| 166 | MRT4577_391398P | MRT3847_250748P.2 |
| 166 | MRT4577_391398P | MRT3847_36849P.2 |
| 167 | MRT4577_234188P | gl_25486627 |
| 167 | MRT4577_234188P | gl_7716952 |
| 167 | MRT4577_234188P | gl_6175246 |
| 167 | MRT4577_234188P | MRT4530_91129P.1 |
| 167 | MRT4577_234188P | MRT4565_77691P.2 |
| 167 | MRT4577_234188P | MRT4565_21523P.3 |
| 167 | MRT4577_234188P | gl_4218537 |
| 168 | MRT4577_264682P | MRT3847_33136P.3 |
| 168 | MRT4577_264682P | gl_32487515 |
| 168 | MRT4577_264682P | gl_24430421 |
| 168 | MRT4577_264682P | gl_7489168 |
| 168 | MRT4577_264682P | gl_7489434 |
| 168 | MRT4577_264682P | gl_7489412 |
| 168 | MRT4577_264682P | MRT4530_101175P.1 |
| 168 | MRT4577_264682P | MRT4565_26905P.2 |
| 169 | MRT4577_287055P | gl_21221074 |
| 169 | MRT4577_287055P | gl_17231176 |
| 169 | MRT4577_287055P | gl_22959136 |
| 169 | MRT4577_287055P | gl_22956679 |
| 169 | MRT4577_287055P | gl_22964886 |
| 169 | MRT4577_287055P | gl_22962301 |
| 169 | MRT4577_287055P | gl_15617074 |
| 169 | MRT4577_287055P | gl_22969349 |
| 169 | MRT4577_287055P | gl_22967579 |
| 169 | MRT4577_287055P | gl_22970179 |
| 169 | MRT4577_287055P | gl_6225171 |
| 169 | MRT4577_287055P | gl_16332067 |
| 169 | MRT4577_287055P | gl_15618755 |
| 169 | MRT4577_287055P | gl_32476155 |
| 169 | MRT4577_287055P | gl_20807120 |
| 169 | MRT4577_287055P | gl_20807894 |
| 169 | MRT4577_287055P | gl_22976982 |
| 169 | MRT4577_287055P | gl_15677237 |
| 169 | MRT4577_287055P | gl_15794478 |
| 169 | MRT4577_287055P | gl_6273581 |
| 169 | MRT4577_287055P | gl_15806971 |
| 169 | MRT4577_287055P | gl_22983077 |
| 169 | MRT4577_287055P | gl_22991721 |
| 169 | MRT4577_287055P | gl_7546983 |
| 169 | MRT4577_287055P | gl_15673133 |
| 169 | MRT4577_287055P | gl_3023975 |
| 169 | MRT4577_287055P | gl_1196314 |
| 169 | MRT4577_287055P | gl_1296452 |
| 169 | MRT4577_287055P | gl_1142616 |
| 169 | MRT4577_287055P | gl_15895897 |
| 169 | MRT4577_287055P | gl_21328719 |
| 169 | MRT4577_287055P | gl_15800168 |
| 169 | MRT4577_287055P | gl_22994398 |
| 169 | MRT4577_287055P | gl_22994632 |
| 169 | MRT4577_287055P | gl_22996222 |
| 169 | MRT4577_287055P | gl_22997796 |
| 169 | MRT4577_287055P | gl_22998791 |
| 169 | MRT4577_287055P | gl_23000020 |
| 169 | MRT4577_287055P | gl_2105144 |
| 169 | MRT4577_287055P | gl_15924664 |
| 169 | MRT4577_287055P | gl_15924244 |
| 169 | MRT4577_287055P | gl_23003622 |
| 169 | MRT4577_287055P | gl_23002438 |
| 169 | MRT4577_287055P | gl_15639499 |
| 169 | MRT4577_287055P | gl_26989025 |
| 169 | MRT4577_287055P | gl_15674910 |
| 169 | MRT4577_287055P | gl_15837790 |
| 169 | MRT4577_287055P | gl_15838086 |
| 169 | MRT4577_287055P | gl_16800375 |
| 169 | MRT4577_287055P | gl_16800386 |
| 169 | MRT4577_287055P | gl_33241266 |
| 169 | MRT4577_287055P | gl_16803308 |
| 169 | MRT4577_287055P | gl_16803319 |
| 169 | MRT4577_287055P | gl_15901412 |
| 169 | MRT4577_287055P | gl_27468267 |
| 169 | MRT4577_287055P | gl_27467848 |
| 169 | MRT4577_287055P | gl_15827775 |
| 169 | MRT4577_287055P | gl_15888589 |
| 169 | MRT4577_287055P | gl_15887403 |
| 169 | MRT4577_287055P | gl_28198387 |
| 169 | MRT4577_287055P | gl_23014985 |
| 169 | MRT4577_287055P | gl_23005242 |
| 169 | MRT4577_287055P | gl_23014725 |
| 169 | MRT4577_287055P | gl_24215258 |
| 169 | MRT4577_287055P | gl_19705311 |
| 169 | MRT4577_287055P | gl_21230440 |
| 169 | MRT4577_287055P | gl_21241839 |
| 169 | MRT4577_287055P | gl_16126204 |
| 169 | MRT4577_287055P | gl_21402518 |
| 169 | MRT4577_287055P | gl_21401812 |
| 169 | MRT4577_287055P | gl_5002358 |
| 169 | MRT4577_287055P | gl_6225163 |
| 169 | MRT4577_287055P | gl_15791646 |
| 169 | MRT4577_287055P | gl_15792017 |
| 169 | MRT4577_287055P | gl_21673243 |
| 169 | MRT4577_287055P | gl_21674017 |
| 169 | MRT4577_287055P | gl_18310374 |
| 169 | MRT4577_287055P | gl_25028847 |
| 169 | MRT4577_287055P | gl_21283347 |
| 169 | MRT4577_287055P | gl_21282866 |
| 169 | MRT4577_287055P | gl_19553586 |
| 169 | MRT4577_287055P | gl_22298053 |
| 169 | MRT4577_287055P | gl_30263833 |
| 169 | MRT4577_287055P | gl_21672725 |
| 169 | MRT4577_287055P | gl_23019058 |
| 169 | MRT4577_287055P | gl_23021744 |
| 169 | MRT4577_287055P | gl_23023390 |
| 169 | MRT4577_287055P | gl_23037705 |
| 169 | MRT4577_287055P | gl_23041315 |
| 169 | MRT4577_287055P | gl_28493446 |
| 169 | MRT4577_287055P | gl_23501986 |
| 169 | MRT4577_287055P | gl_23502927 |
| 169 | MRT4577_287055P | gl_23336808 |
| 169 | MRT4577_287055P | gl_23336272 |
| 169 | MRT4577_287055P | gl_23467432 |
| 169 | MRT4577_287055P | gl_23469166 |
| 169 | MRT4577_287055P | gl_23058851 |
| 169 | MRT4577_287055P | gl_23465516 |
| 169 | MRT4577_287055P | gl_23474551 |
| 169 | MRT4577_287055P | gl_23475994 |
| 169 | MRT4577_287055P | gl_22537459 |
| 169 | MRT4577_287055P | gl_15596999 |
| 169 | MRT4577_287055P | gl_27887595 |
| 169 | MRT4577_287055P | gl_24379392 |
| 169 | MRT4577_287055P | gl_25011425 |
| 169 | MRT4577_287055P | gl_24373361 |
| 169 | MRT4577_287055P | gl_28211966 |
| 169 | MRT4577_287055P | gl_16123318 |
| 169 | MRT4577_287055P | gl_27363511 |
| 169 | MRT4577_287055P | gl_28572441 |
| 169 | MRT4577_287055P | gl_28378738 |
| 169 | MRT4577_287055P | gl_28378504 |
| 169 | MRT4577_287055P | gl_23099532 |
| 169 | MRT4577_287055P | gl_23099005 |
| 169 | MRT4577_287055P | gl_28870880 |
| 169 | MRT4577_287055P | gl_28897692 |
| 169 | MRT4577_287055P | gl_16079874 |
| 169 | MRT4577_287055P | gl_16078679 |
| 169 | MRT4577_287055P | gl_15606540 |
| 169 | MRT4577_287055P | gl_15605757 |
| 169 | MRT4577_287055P | gl_15594957 |
| 169 | MRT4577_287055P | gl_15594640 |
| 169 | MRT4577_287055P | gl_27380054 |
| 169 | MRT4577_287055P | gl_27375757 |
| 169 | MRT4577_287055P | gl_17987158 |
| 169 | MRT4577_287055P | gl_17988331 |
| 169 | MRT4577_287055P | gl_27904899 |
| 169 | MRT4577_287055P | gl_29376445 |
| 169 | MRT4577_287055P | gl_29376200 |
| 169 | MRT4577_287055P | gl_29349251 |
| 169 | MRT4577_287055P | gl_30022560 |
| 169 | MRT4577_287055P | gl_30021917 |
| 169 | MRT4577_287055P | gl_29654073 |
| 169 | MRT4577_287055P | gl_29831992 |
| 169 | MRT4577_287055P | gl_29840676 |
| 169 | MRT4577_287055P | gl_32035049 |
| 169 | MRT4577_287055P | gl_30248063 |
| 169 | MRT4577_287055P | gl_15642920 |
| 169 | MRT4577_287055P | gl_15643288 |
| 169 | MRT4577_287055P | gl_6942107 |
| 169 | MRT4577_287055P | gl_11133033 |
| 169 | MRT4577_287055P | gl_27262354 |
| 169 | MRT4577_287055P | gl_23056436 |
| 169 | MRT4577_287055P | gl_17546431 |
| 169 | MRT4577_287055P | gl_22532109 |
| 169 | MRT4577_287055P | gl_8134368 |
| 169 | MRT4577_287055P | gl_27804891 |
| 169 | MRT4577_287055P | gl_23103564 |
| 169 | MRT4577_287055P | gl_23104278 |
| 169 | MRT4577_287055P | gl_142369 |
| 169 | MRT4577_287055P | gl_28262700 |
| 169 | MRT4577_287055P | gl_28262023 |
| 169 | MRT4577_287055P | gl_32490903 |
| 169 | MRT4577_287055P | gl_13476995 |
| 169 | MRT4577_287055P | gl_13474176 |
| 169 | MRT4577_287055P | gl_22653795 |
| 169 | MRT4577_287055P | gl_15965009 |
| 169 | MRT4577_287055P | MRT4565_98303P.2 |
| 169 | MRT4577_287055P | MRT4565_43124P.2 |
| 169 | MRT4577_287055P | gl_23108079 |
| 169 | MRT4577_287055P | gl_6319704 |
| 169 | MRT4577_287055P | gl_23119424 |
| 169 | MRT4577_287055P | gl_23111737 |
| 169 | MRT4577_287055P | gl_23111624 |
| 169 | MRT4577_287055P | gl_32409603 |
| 169 | MRT4577_287055P | gl_388977 |
| 169 | MRT4577_287055P | gl_23123457 |
| 169 | MRT4577_287055P | gl_7594817 |
| 169 | MRT4577_287055P | gl_6225174 |
| 169 | MRT4577_287055P | gl_23126009 |
| 169 | MRT4577_287055P | gl_15641923 |
| 169 | MRT4577_287055P | gl_1655938 |
| 169 | MRT4577_287055P | gl_16272655 |
| 169 | MRT4577_287055P | gl_23130789 |
| 169 | MRT4577_287055P | gl_15603842 |
| 169 | MRT4577_287055P | gl_15892991 |
| 169 | MRT4577_287055P | gl_15892357 |
| 169 | MRT4577_287055P | gl_15604535 |
| 169 | MRT4577_287055P | gl_15604188 |
| 169 | MRT4577_287055P | gl_15605438 |
| 169 | MRT4577_287055P | gl_15841981 |
| 169 | MRT4577_287055P | gl_15609594 |
| 169 | MRT4577_287055P | gl_15834703 |
| 169 | MRT4577_287055P | gl_23132758 |
| 169 | MRT4577_287055P | gl_15645984 |
| 169 | MRT4577_287055P | gl_15645143 |
| 169 | MRT4577_287055P | gl_15612353 |
| 169 | MRT4577_287055P | gl_15611532 |
| 169 | MRT4577_287055P | gl_15615614 |
| 169 | MRT4577_287055P | gl_15615026 |
| 169 | MRT4577_287055P | gl_16759429 |
| 169 | MRT4577_287055P | gl_23136411 |
| 169 | MRT4577_287055P | gl_23137026 |
| 169 | MRT4577_287055P | gl_16763830 |
| 170 | MRT4577_49099P | gl_5758877 |
| 170 | MRT4577_49099P | gl_5758896 |
| 170 | MRT4577_49099P | gl_5758897 |
| 170 | MRT4577_49099P | gl_5758903 |
| 170 | MRT4577_49099P | gl_5758867 |
| 170 | MRT4577_49099P | gl_5758886 |
| 170 | MRT4577_49099P | gl_5758911 |
| 170 | MRT4577_49099P | gl_6467949 |
| 170 | MRT4577_49099P | gl_6467934 |
| 170 | MRT4577_49099P | gl_14718030 |
| 170 | MRT4577_49099P | gl_12004119 |
| 170 | MRT4577_49099P | gl_12004145 |
| 170 | MRT4577_49099P | gl_12004143 |
| 170 | MRT4577_49099P | gl_12004127 |
| 170 | MRT4577_49099P | gl_12004121 |
| 170 | MRT4577_49099P | gl_12004115 |
| 170 | MRT4577_49099P | gl_12004137 |
| 170 | MRT4577_49099P | gl_12004139 |
| 170 | MRT4577_49099P | gl_12004149 |
| 170 | MRT4577_49099P | gl_12004151 |
| 170 | MRT4577_49099P | gl_12004153 |
| 170 | MRT4577_49099P | gl_12004159 |
| 170 | MRT4577_49099P | gl_12004161 |
| 170 | MRT4577_49099P | gl_12004133 |
| 170 | MRT4577_49099P | gl_12004113 |
| 170 | MRT4577_49099P | gl_15921725 |
| 170 | MRT4577_49099P | gl_15425576 |
| 170 | MRT4577_49099P | gl_21633411 |
| 170 | MRT4577_49099P | gl_11527563 |
| 170 | MRT4577_49099P | gl_14717924 |
| 170 | MRT4577_49099P | gl_14718224 |
| 170 | MRT4577_49099P | gl_14717935 |
| 170 | MRT4577_49099P | gl_14717920 |
| 170 | MRT4577_49099P | gl_14718095 |
| 170 | MRT4577_49099P | gl_14718090 |
| 170 | MRT4577_49099P | gl_14718060 |
| 170 | MRT4577_49099P | gl_14718167 |
| 170 | MRT4577_49099P | gl_14718242 |
| 170 | MRT4577_49099P | gl_14718228 |
| 170 | MRT4577_49099P | gl_24940166 |
| 170 | MRT4577_49099P | gl_24940194 |
| 170 | MRT4577_49099P | gl_17224755 |
| 170 | MRT4577_49099P | gl_27528494 |
| 170 | MRT4577_49099P | gl_27528472 |
| 170 | MRT4577_49099P | gl_16330679 |
| 170 | MRT4577_49099P | gl_15618012 |
| 170 | MRT4577_49099P | gl_22094585 |
| 170 | MRT4577_49099P | gl_14718165 |
| 170 | MRT4577_49099P | gl_21684927 |
| 170 | MRT4577_49099P | gl_18077603 |
| 170 | MRT4577_49099P | gl_18077601 |
| 170 | MRT4577_49099P | gl_20514385 |
| 170 | MRT4577_49099P | gl_15805727 |
| 170 | MRT4577_49099P | gl_584810 |
| 170 | MRT4577_49099P | gl_14718042 |
| 170 | MRT4577_49099P | gl_19033077 |
| 170 | MRT4577_49099P | gl_14718232 |
| 170 | MRT4577_49099P | gl_12005284 |
| 170 | MRT4577_49099P | gl_7687960 |
| 170 | MRT4577_49099P | gl_5001573 |
| 170 | MRT4577_49099P | gl_7708171 |
| 170 | MRT4577_49099P | gl_24940162 |
| 170 | MRT4577_49099P | gl_14717984 |
| 170 | MRT4577_49099P | gl_6687199 |
| 170 | MRT4577_49099P | gl_14717990 |
| 170 | MRT4577_49099P | gl_5001583 |
| 170 | MRT4577_49099P | gl_8517408 |
| 170 | MRT4577_49099P | gl_7708197 |
| 170 | MRT4577_49099P | gl_4063542 |
| 170 | MRT4577_49099P | gl_7687974 |
| 170 | MRT4577_49099P | gl_7708284 |
| 170 | MRT4577_49099P | gl_22992679 |
| 170 | MRT4577_49099P | gl_7687976 |
| 170 | MRT4577_49099P | gl_6687483 |
| 170 | MRT4577_49099P | gl_14718056 |
| 170 | MRT4577_49099P | gl_21684893 |
| 170 | MRT4577_49099P | gl_1171780 |
| 170 | MRT4577_49099P | gl_97924 |
| 170 | MRT4577_49099P | gl_1072369 |
| 170 | MRT4577_49099P | gl_6706178 |
| 170 | MRT4577_49099P | gl_7708570 |
| 170 | MRT4577_49099P | gl_7688039 |
| 170 | MRT4577_49099P | gl_7688411 |
| 170 | MRT4577_49099P | gl_19033051 |
| 170 | MRT4577_49099P | gl_16416760 |
| 170 | MRT4577_49099P | gl_30352098 |
| 170 | MRT4577_49099P | gl_12585416 |
| 170 | MRT4577_49099P | gl_21956014 |
| 170 | MRT4577_49099P | gl_16416758 |
| 170 | MRT4577_49099P | gl_27435896 |
| 170 | MRT4577_49099P | gl_19033069 |
| 170 | MRT4577_49099P | gl_32526541 |
| 170 | MRT4577_49099P | gl_32526543 |
| 170 | MRT4577_49099P | gl_15639519 |
| 170 | MRT4577_49099P | gl_15639417 |
| 170 | MRT4577_49099P | gl_15674362 |
| 170 | MRT4577_49099P | gl_2493121 |
| 170 | MRT4577_49099P | gl_1929027 |
| 170 | MRT4577_49099P | gl_24528335 |
| 170 | MRT4577_49099P | gl_16416730 |
| 170 | MRT4577_49099P | gl_16416738 |
| 170 | MRT4577_49099P | gl_7708329 |
| 170 | MRT4577_49099P | gl_15901171 |
| 170 | MRT4577_49099P | gl_15425574 |
| 170 | MRT4577_49099P | gl_20384961 |
| 170 | MRT4577_49099P | gl_28188331 |
| 170 | MRT4577_49099P | gl_20467373 |
| 170 | MRT4577_49099P | gl_20467387 |
| 170 | MRT4577_49099P | gl_20467383 |
| 170 | MRT4577_49099P | gl_16417186 |
| 170 | MRT4577_49099P | gl_18312083 |
| 170 | MRT4577_49099P | gl_21684909 |
| 170 | MRT4577_49099P | gl_21684891 |
| 170 | MRT4577_49099P | gl_21684869 |
| 170 | MRT4577_49099P | gl_18075919 |
| 170 | MRT4577_49099P | gl_18077607 |
| 170 | MRT4577_49099P | gl_18075921 |
| 170 | MRT4577_49099P | gl_24940196 |
| 170 | MRT4577_49099P | gl_24940262 |
| 170 | MRT4577_49099P | gl_19033091 |
| 170 | MRT4577_49099P | gl_21667292 |
| 170 | MRT4577_49099P | gl_19745323 |
| 170 | MRT4577_49099P | gl_18976554 |
| 170 | MRT4577_49099P | gl_19033067 |
| 170 | MRT4577_49099P | gl_15678973 |
| 170 | MRT4577_49099P | gl_20092951 |
| 170 | MRT4577_49099P | gl_20094453 |
| 170 | MRT4577_49099P | gl_28188341 |
| 170 | MRT4577_49099P | gl_28188339 |
| 170 | MRT4577_49099P | gl_19705056 |
| 170 | MRT4577_49099P | gl_19705057 |
| 170 | MRT4577_49099P | gl_28188329 |
| 170 | MRT4577_49099P | gl_16127677 |
| 170 | MRT4577_49099P | gl_20269434 |
| 170 | MRT4577_49099P | gl_20269410 |
| 170 | MRT4577_49099P | gl_20269418 |
| 170 | MRT4577_49099P | gl_21226882 |
| 170 | MRT4577_49099P | gl_23503627 |
| 170 | MRT4577_49099P | gl_30316239 |
| 170 | MRT4577_49099P | gl_28895034 |
| 170 | MRT4577_49099P | gl_18310620 |
| 170 | MRT4577_49099P | gl_30265987 |
| 170 | MRT4577_49099P | gl_21633339 |
| 170 | MRT4577_49099P | gl_21633397 |
| 170 | MRT4577_49099P | gl_21633375 |
| 170 | MRT4577_49099P | gl_21633369 |
| 170 | MRT4577_49099P | gl_21633323 |
| 170 | MRT4577_49099P | gl_21633359 |
| 170 | MRT4577_49099P | gl_21633435 |
| 170 | MRT4577_49099P | gl_21633371 |
| 170 | MRT4577_49099P | gl_21633423 |
| 170 | MRT4577_49099P | gl_21633419 |
| 170 | MRT4577_49099P | gl_21633441 |
| 170 | MRT4577_49099P | gl_21633405 |
| 170 | MRT4577_49099P | gl_21633433 |
| 170 | MRT4577_49099P | gl_21633431 |
| 170 | MRT4577_49099P | gl_21633365 |
| 170 | MRT4577_49099P | gl_21633355 |
| 170 | MRT4577_49099P | gl_21633349 |
| 170 | MRT4577_49099P | gl_21633343 |
| 170 | MRT4577_49099P | gl_21633399 |
| 170 | MRT4577_49099P | gl_21633415 |
| 170 | MRT4577_49099P | gl_21633417 |
| 170 | MRT4577_49099P | gl_21633425 |
| 170 | MRT4577_49099P | gl_21633427 |
| 170 | MRT4577_49099P | gl_21633301 |
| 170 | MRT4577_49099P | gl_21633437 |
| 170 | MRT4577_49099P | gl_21633361 |
| 170 | MRT4577_49099P | gl_21633379 |
| 170 | MRT4577_49099P | gl_21633383 |
| 170 | MRT4577_49099P | gl_21633381 |
| 170 | MRT4577_49099P | gl_21909656 |
| 170 | MRT4577_49099P | gl_23021511 |
| 170 | MRT4577_49099P | gl_24940164 |
| 170 | MRT4577_49099P | gl_24940168 |
| 170 | MRT4577_49099P | gl_24940174 |
| 170 | MRT4577_49099P | gl_24940176 |
| 170 | MRT4577_49099P | gl_24940246 |
| 170 | MRT4577_49099P | gl_24940248 |
| 170 | MRT4577_49099P | gl_24940256 |
| 170 | MRT4577_49099P | gl_24940266 |
| 170 | MRT4577_49099P | gl_24940204 |
| 170 | MRT4577_49099P | gl_24940264 |
| 170 | MRT4577_49099P | gl_30351915 |
| 170 | MRT4577_49099P | gl_30351917 |
| 170 | MRT4577_49099P | gl_15596894 |
| 170 | MRT4577_49099P | gl_27886806 |
| 170 | MRT4577_49099P | gl_15828737 |
| 170 | MRT4577_49099P | gl_15828707 |
| 170 | MRT4577_49099P | gl_28210705 |
| 170 | MRT4577_49099P | gl_28211923 |
| 170 | MRT4577_49099P | gl_80953 |
| 170 | MRT4577_49099P | gl_15668390 |
| 170 | MRT4577_49099P | gl_12585563 |
| 170 | MRT4577_49099P | gl_114520 |
| 170 | MRT4577_49099P | gl_23051710 |
| 170 | MRT4577_49099P | gl_11267101 |
| 170 | MRT4577_49099P | gl_7708468 |
| 170 | MRT4577_49099P | gl_114516 |
| 170 | MRT4577_49099P | gl_11498766 |
| 170 | MRT4577_49099P | gl_15594440 |
| 170 | MRT4577_49099P | gl_2493099 |
| 170 | MRT4577_49099P | gl_27904521 |
| 170 | MRT4577_49099P | gl_29376065 |
| 170 | MRT4577_49099P | gl_29346709 |
| 170 | MRT4577_49099P | gl_7436320 |
| 170 | MRT4577_49099P | gl_29840442 |
| 170 | MRT4577_49099P | gl_32034348 |
| 170 | MRT4577_49099P | gl_114528 |
| 170 | MRT4577_49099P | gl_15897484 |
| 170 | MRT4577_49099P | gl_14718003 |
| 170 | MRT4577_49099P | gl_16081190 |
| 170 | MRT4577_49099P | gl_9229839 |
| 170 | MRT4577_49099P | gl_18075929 |
| 170 | MRT4577_49099P | gl_6688706 |
| 170 | MRT4577_49099P | gl_21633463 |
| 170 | MRT4577_49099P | gl_6689006 |
| 170 | MRT4577_49099P | gl_7708189 |
| 170 | MRT4577_49099P | gl_6689008 |
| 170 | MRT4577_49099P | gl_14718107 |
| 170 | MRT4577_49099P | gl_24298775 |
| 170 | MRT4577_49099P | gl_4063526 |
| 170 | MRT4577_49099P | gl_1072952 |
| 170 | MRT4577_49099P | gl_29420857 |
| 170 | MRT4577_49099P | gl_27528482 |
| 170 | MRT4577_49099P | gl_29420859 |
| 170 | MRT4577_49099P | gl_27528474 |
| 170 | MRT4577_49099P | gl_29420871 |
| 170 | MRT4577_49099P | gl_29420867 |
| 170 | MRT4577_49099P | gl_29420869 |
| 170 | MRT4577_49099P | gl_27528492 |
| 170 | MRT4577_49099P | gl_27528498 |
| 170 | MRT4577_49099P | gl_29420865 |
| 170 | MRT4577_49099P | gl_27528480 |
| 170 | MRT4577_49099P | gl_32172455 |
| 170 | MRT4577_49099P | gl_1352828 |
| 170 | MRT4577_49099P | gl_23054147 |
| 170 | MRT4577_49099P | gl_11467561 |
| 170 | MRT4577_49099P | gl_15425588 |
| 170 | MRT4577_49099P | gl_7706848 |
| 170 | MRT4577_49099P | gl_6688492 |
| 170 | MRT4577_49099P | gl_6687737 |
| 170 | MRT4577_49099P | gl_4731151 |
| 170 | MRT4577_49099P | gl_14718009 |
| 170 | MRT4577_49099P | gl_14718099 |
| 170 | MRT4577_49099P | gl_14718230 |
| 170 | MRT4577_49099P | gl_7708662 |
| 170 | MRT4577_49099P | gl_2459981 |
| 170 | MRT4577_49099P | gl_7688337 |
| 170 | MRT4577_49099P | gl_4063558 |
| 170 | MRT4577_49099P | gl_7706839 |
| 170 | MRT4577_49099P | gl_29420855 |
| 170 | MRT4577_49099P | gl_14521960 |
| 170 | MRT4577_49099P | gl_27550061 |
| 170 | MRT4577_49099P | gl_21264381 |
| 170 | MRT4577_49099P | gl_7708538 |
| 170 | MRT4577_49099P | gl_7688031 |
| 170 | MRT4577_49099P | gl_17548614 |
| 170 | MRT4577_49099P | gl_19033063 |
| 170 | MRT4577_49099P | gl_28188335 |
| 170 | MRT4577_49099P | gl_28188325 |
| 170 | MRT4577_49099P | gl_19033097 |
| 170 | MRT4577_49099P | gl_19033089 |
| 170 | MRT4577_49099P | gl_5869971 |
| 170 | MRT4577_49099P | gl_11466709 |
| 170 | MRT4577_49099P | gl_24460025 |
| 170 | MRT4577_49099P | gl_14718147 |
| 170 | MRT4577_49099P | gl_4995759 |
| 170 | MRT4577_49099P | gl_4063560 |
| 170 | MRT4577_49099P | gl_3023341 |
| 170 | MRT4577_49099P | gl_12585499 |
| 170 | MRT4577_49099P | gl_27435914 |
| 170 | MRT4577_49099P | gl_11034791 |
| 170 | MRT4577_49099P | gl_14718151 |
| 170 | MRT4577_49099P | gl_5758854 |
| 170 | MRT4577_49099P | gl_18075917 |
| 170 | MRT4577_49099P | gl_24940180 |
| 170 | MRT4577_49099P | gl_24940198 |
| 170 | MRT4577_49099P | gl_6687481 |
| 170 | MRT4577_49099P | gl_29420863 |
| 170 | MRT4577_49099P | gl_29420861 |
| 170 | MRT4577_49099P | gl_27528478 |
| 170 | MRT4577_49099P | gl_7708335 |
| 170 | MRT4577_49099P | gl_14718076 |
| 170 | MRT4577_49099P | gl_7708181 |
| 170 | MRT4577_49099P | gl_7578495 |
| 170 | MRT4577_49099P | gl_1430917 |
| 170 | MRT4577_49099P | gl_6017822 |
| 170 | MRT4577_49099P | gl_7708173 |
| 170 | MRT4577_49099P | gl_13235340 |
| 170 | MRT4577_49099P | gl_1336803 |
| 170 | MRT4577_49099P | gl_11497535 |
| 170 | MRT4577_49099P | gl_67842 |
| 170 | MRT4577_49099P | gl_27529083 |
| 170 | MRT4577_49099P | gl_21684925 |
| 170 | MRT4577_49099P | gl_2493120 |
| 170 | MRT4577_49099P | gl_3334408 |
| 170 | MRT4577_49099P | gl_5758914 |
| 170 | MRT4577_49099P | gl_14718136 |
| 170 | MRT4577_49099P | gl_7708574 |
| 170 | MRT4577_49099P | gl_401322 |
| 170 | MRT4577_49099P | gl_3169287 |
| 170 | MRT4577_49099P | gl_4995846 |
| 170 | MRT4577_49099P | gl_4063538 |
| 170 | MRT4577_49099P | gl_32490757 |
| 170 | MRT4577_49099P | gl_14718222 |
| 170 | MRT4577_49099P | gl_14718189 |
| 170 | MRT4577_49099P | gl_15219234 |
| 170 | MRT4577_49099P | gl_2493122 |
| 170 | MRT4577_49099P | gl_14718140 |
| 170 | MRT4577_49099P | gl_19033053 |
| 170 | MRT4577_49099P | gl_16416736 |
| 170 | MRT4577_49099P | gl_4063562 |
| 170 | MRT4577_49099P | gl_15982954 |
| 170 | MRT4577_49099P | gl_6634078 |
| 170 | MRT4577_49099P | gl_6634488 |
| 170 | MRT4577_49099P | gl_1934688 |
| 170 | MRT4577_49099P | gl_14718046 |
| 170 | MRT4577_49099P | MRT3847_257212P.1 |
| 170 | MRT4577_49099P | MRT3847_70323P.2 |
| 170 | MRT4577_49099P | MRT3847_257209P.2 |
| 170 | MRT4577_49099P | gl_6687375 |
| 170 | MRT4577_49099P | gl_8452718 |
| 170 | MRT4577_49099P | gl_14585885 |
| 170 | MRT4577_49099P | gl_2506211 |
| 170 | MRT4577_49099P | gl_7708139 |
| 170 | MRT4577_49099P | gl_7708327 |
| 170 | MRT4577_49099P | gl_5001589 |
| 170 | MRT4577_49099P | gl_6688704 |
| 170 | MRT4577_49099P | gl_6689056 |
| 170 | MRT4577_49099P | gl_29726150 |
| 170 | MRT4577_49099P | gl_14718007 |
| 170 | MRT4577_49099P | gl_6689562 |
| 170 | MRT4577_49099P | gl_7708177 |
| 170 | MRT4577_49099P | gl_16943664 |
| 170 | MRT4577_49099P | gl_16943662 |
| 170 | MRT4577_49099P | gl_5758894 |
| 170 | MRT4577_49099P | gl_7708568 |
| 170 | MRT4577_49099P | gl_11466794 |
| 170 | MRT4577_49099P | gl_19920171 |
| 170 | MRT4577_49099P | gl_14718072 |
| 170 | MRT4577_49099P | gl_7708333 |
| 170 | MRT4577_49099P | gl_4063522 |
| 170 | MRT4577_49099P | gl_1041768 |
| 170 | MRT4577_49099P | gl_137460 |
| 170 | MRT4577_49099P | gl_553048 |
| 170 | MRT4577_49099P | gl_5001569 |
| 170 | MRT4577_49099P | gl_6706180 |
| 170 | MRT4577_49099P | gl_27884018 |
| 170 | MRT4577_49099P | gl_27883932 |
| 170 | MRT4577_49099P | gl_19033057 |
| 170 | MRT4577_49099P | gl_19033055 |
| 170 | MRT4577_49099P | gl_231596 |
| 170 | MRT4577_49099P | gl_6688901 |
| 170 | MRT4577_49099P | gl_7708153 |
| 170 | MRT4577_49099P | gl_6689307 |
| 170 | MRT4577_49099P | gl_6686963 |
| 170 | MRT4577_49099P | gl_7708634 |
| 170 | MRT4577_49099P | gl_8517661 |
| 170 | MRT4577_49099P | gl_7708308 |
| 170 | MRT4577_49099P | gl_7708444 |
| 170 | MRT4577_49099P | gl_7708215 |
| 170 | MRT4577_49099P | gl_6687550 |
| 170 | MRT4577_49099P | gl_7708464 |
| 170 | MRT4577_49099P | gl_7708630 |
| 170 | MRT4577_49099P | gl_6017838 |
| 170 | MRT4577_49099P | gl_12004131 |
| 170 | MRT4577_49099P | gl_6687278 |
| 170 | MRT4577_49099P | gl_6687548 |
| 170 | MRT4577_49099P | gl_6687660 |
| 170 | MRT4577_49099P | gl_6689113 |
| 170 | MRT4577_49099P | gl_14718013 |
| 170 | MRT4577_49099P | gl_4206564 |
| 170 | MRT4577_49099P | gl_8452749 |
| 170 | MRT4577_49099P | gl_4063566 |
| 170 | MRT4577_49099P | gl_22651734 |
| 170 | MRT4577_49099P | gl_7592738 |
| 170 | MRT4577_49099P | gl_4063564 |
| 170 | MRT4577_49099P | gl_4063524 |
| 170 | MRT4577_49099P | gl_8452756 |
| 170 | MRT4577_49099P | gl_11908164 |
| 170 | MRT4577_49099P | gl_4206610 |
| 170 | MRT4577_49099P | gl_19033085 |
| 170 | MRT4577_49099P | gl_5031147 |
| 170 | MRT4577_49099P | gl_14718153 |
| 170 | MRT4577_49099P | gl_7688029 |
| 170 | MRT4577_49099P | gl_7687964 |
| 170 | MRT4577_49099P | gl_11034787 |
| 170 | MRT4577_49099P | gl_6017814 |
| 170 | MRT4577_49099P | gl_7706835 |
| 170 | MRT4577_49099P | gl_17224761 |
| 170 | MRT4577_49099P | gl_5758895 |
| 170 | MRT4577_49099P | gl_2493123 |
| 170 | MRT4577_49099P | gl_29539348 |
| 170 | MRT4577_49099P | gl_4995717 |
| 170 | MRT4577_49099P | gl_4063552 |
| 170 | MRT4577_49099P | gl_6017792 |
| 170 | MRT4577_49099P | gl_7708321 |
| 170 | MRT4577_49099P | MRT4530_8337P.2 |
| 170 | MRT4577_49099P | MRT4530_87661P.1 |
| 170 | MRT4577_49099P | MRT4530_72752P.2 |
| 170 | MRT4577_49099P | MRT4530_87659P.1 |
| 170 | MRT4577_49099P | MRT4530_87660P.1 |
| 170 | MRT4577_49099P | MRT4530_60814P.1 |
| 170 | MRT4577_49099P | MRT4530_27618P.1 |
| 170 | MRT4577_49099P | gl_227786 |
| 170 | MRT4577_49099P | MRT4565_101762P.1 |
| 170 | MRT4577_49099P | MRT4565_24817P.3 |
| 170 | MRT4577_49099P | MRT4565_59504P.2 |
| 170 | MRT4577_49099P | gl_6689231 |
| 170 | MRT4577_49099P | gl_6017824 |
| 170 | MRT4577_49099P | gl_14717997 |
| 170 | MRT4577_49099P | gl_5758866 |
| 170 | MRT4577_49099P | gl_5758898 |
| 170 | MRT4577_49099P | gl_5758878 |
| 170 | MRT4577_49099P | gl_5758899 |
| 170 | MRT4577_49099P | gl_6688636 |
| 170 | MRT4577_49099P | gl_6689309 |
| 170 | MRT4577_49099P | gl_5758884 |
| 170 | MRT4577_49099P | gl_5758908 |
| 170 | MRT4577_49099P | gl_5758921 |
| 170 | MRT4577_49099P | gl_5758888 |
| 170 | MRT4577_49099P | gl_6692624 |
| 170 | MRT4577_49099P | gl_6601482 |
| 170 | MRT4577_49099P | gl_7708157 |
| 170 | MRT4577_49099P | gl_14718111 |
| 170 | MRT4577_49099P | gl_27528476 |
| 170 | MRT4577_49099P | gl_28202179 |
| 170 | MRT4577_49099P | gl_14717950 |
| 170 | MRT4577_49099P | gl_24940182 |
| 170 | MRT4577_49099P | gl_14717931 |
| 170 | MRT4577_49099P | gl_6687201 |
| 170 | MRT4577_49099P | gl_6689111 |
| 170 | MRT4577_49099P | gl_19114337 |
| 170 | MRT4577_49099P | gl_6689408 |
| 170 | MRT4577_49099P | gl_27526581 |
| 170 | MRT4577_49099P | gl_27528490 |
| 170 | MRT4577_49099P | gl_3417405 |
| 170 | MRT4577_49099P | gl_29420851 |
| 170 | MRT4577_49099P | gl_6320016 |
| 170 | MRT4577_49099P | gl_172907 |
| 170 | MRT4577_49099P | gl_29420847 |
| 170 | MRT4577_49099P | gl_29420835 |
| 170 | MRT4577_49099P | gl_29420833 |
| 170 | MRT4577_49099P | gl_29420837 |
| 170 | MRT4577_49099P | gl_29420849 |
| 170 | MRT4577_49099P | gl_29420843 |
| 170 | MRT4577_49099P | gl_27528502 |
| 170 | MRT4577_49099P | gl_27528500 |
| 170 | MRT4577_49099P | gl_27529077 |
| 170 | MRT4577_49099P | gl_27529081 |
| 170 | MRT4577_49099P | gl_27529079 |
| 170 | MRT4577_49099P | gl_15422204 |
| 170 | MRT4577_49099P | gl_15422208 |
| 170 | MRT4577_49099P | gl_15425560 |
| 170 | MRT4577_49099P | gl_15425564 |
| 170 | MRT4577_49099P | gl_15425590 |
| 170 | MRT4577_49099P | gl_18077605 |
| 170 | MRT4577_49099P | gl_8452620 |
| 170 | MRT4577_49099P | gl_16943741 |
| 170 | MRT4577_49099P | gl_16943745 |
| 170 | MRT4577_49099P | gl_7708256 |
| 170 | MRT4577_49099P | gl_20467381 |
| 170 | MRT4577_49099P | gl_13540883 |
| 170 | MRT4577_49099P | gl_6017840 |
| 170 | MRT4577_49099P | gl_7708658 |
| 170 | MRT4577_49099P | gl_16444949 |
| 170 | MRT4577_49099P | gl_23503623 |
| 170 | MRT4577_49099P | gl_32412440 |
| 170 | MRT4577_49099P | gl_27526583 |
| 170 | MRT4577_49099P | gl_16416748 |
| 170 | MRT4577_49099P | gl_14591712 |
| 170 | MRT4577_49099P | gl_9799472 |
| 170 | MRT4577_49099P | gl_29420853 |
| 170 | MRT4577_49099P | gl_586209 |
| 170 | MRT4577_49099P | gl_3850934 |
| 170 | MRT4577_49099P | gl_3850978 |
| 170 | MRT4577_49099P | gl_6467950 |
| 170 | MRT4577_49099P | gl_12585490 |
| 170 | MRT4577_49099P | gl_7708260 |
| 170 | MRT4577_49099P | gl_14717946 |
| 170 | MRT4577_49099P | gl_6467935 |
| 170 | MRT4577_49099P | gl_6599365 |
| 170 | MRT4577_49099P | gl_11467696 |
| 170 | MRT4577_49099P | gl_14600685 |
| 170 | MRT4577_49099P | gl_18075915 |
| 170 | MRT4577_49099P | gl_6724287 |
| 170 | MRT4577_49099P | gl_14718201 |
| 170 | MRT4577_49099P | gl_7708448 |
| 170 | MRT4577_49099P | gl_16943658 |
| 170 | MRT4577_49099P | gl_5758910 |
| 170 | MRT4577_49099P | gl_8452704 |
| 170 | MRT4577_49099P | gl_16943668 |
| 170 | MRT4577_49099P | gl_7708642 |
| 170 | MRT4577_49099P | gl_7708668 |
| 170 | MRT4577_49099P | gl_12585391 |
| 170 | MRT4577_49099P | gl_12004165 |
| 170 | MRT4577_49099P | gl_12004135 |
| 170 | MRT4577_49099P | gl_12004123 |
| 170 | MRT4577_49099P | gl_12004117 |
| 170 | MRT4577_49099P | gl_12004111 |
| 170 | MRT4577_49099P | gl_12004157 |
| 170 | MRT4577_49099P | gl_12004167 |
| 170 | MRT4577_49099P | gl_11558464 |
| 170 | MRT4577_49099P | gl_7688339 |
| 170 | MRT4577_49099P | gl_7708187 |
| 170 | MRT4577_49099P | gl_7708442 |
| 170 | MRT4577_49099P | gl_10955560 |
| 170 | MRT4577_49099P | gl_14717933 |
| 170 | MRT4577_49099P | gl_7708304 |
| 170 | MRT4577_49099P | gl_7708572 |
| 170 | MRT4577_49099P | gl_14718240 |
| 170 | MRT4577_49099P | gl_732262 |
| 170 | MRT4577_49099P | gl_7687980 |
| 170 | MRT4577_49099P | gl_12229704 |
| 170 | MRT4577_49099P | gl_15790973 |
| 170 | MRT4577_49099P | gl_4063536 |
| 170 | MRT4577_49099P | gl_7688421 |
| 170 | MRT4577_49099P | gl_14718038 |
| 170 | MRT4577_49099P | gl_4995097 |
| 170 | MRT4577_49099P | gl_4063556 |
| 170 | MRT4577_49099P | gl_4063530 |
| 170 | MRT4577_49099P | gl_4206576 |
| 170 | MRT4577_49099P | gl_4206592 |
| 170 | MRT4577_49099P | gl_4995053 |
| 170 | MRT4577_49099P | gl_4995757 |
| 170 | MRT4577_49099P | gl_23503621 |
| 170 | MRT4577_49099P | gl_4063540 |
| 170 | MRT4577_49099P | gl_4063550 |
| 170 | MRT4577_49099P | gl_4995854 |
| 170 | MRT4577_49099P | gl_4063528 |
| 170 | MRT4577_49099P | gl_4063570 |
| 170 | MRT4577_49099P | gl_4063568 |
| 170 | MRT4577_49099P | gl_7708339 |
| 170 | MRT4577_49099P | gl_15425580 |
| 170 | MRT4577_49099P | gl_19033087 |
| 170 | MRT4577_49099P | gl_21684907 |
| 170 | MRT4577_49099P | gl_21684923 |
| 170 | MRT4577_49099P | gl_21684881 |
| 170 | MRT4577_49099P | gl_21684885 |
| 170 | MRT4577_49099P | gl_4206588 |
| 170 | MRT4577_49099P | gl_4206584 |
| 170 | MRT4577_49099P | gl_4206602 |
| 170 | MRT4577_49099P | gl_8388947 |
| 170 | MRT4577_49099P | gl_4206606 |
| 170 | MRT4577_49099P | gl_4206598 |
| 170 | MRT4577_49099P | gl_4206578 |
| 170 | MRT4577_49099P | gl_4206604 |
| 170 | MRT4577_49099P | gl_4206608 |
| 170 | MRT4577_49099P | gl_14718085 |
| 170 | MRT4577_49099P | gl_28188337 |
| 170 | MRT4577_49099P | gl_24940184 |
| 170 | MRT4577_49099P | gl_24940260 |
| 170 | MRT4577_49099P | gl_24940270 |
| 170 | MRT4577_49099P | gl_7708163 |
| 170 | MRT4577_49099P | gl_7708514 |
| 170 | MRT4577_49099P | gl_15605029 |
| 170 | MRT4577_49099P | gl_5758891 |
| 170 | MRT4577_49099P | gl_30351931 |
| 170 | MRT4577_49099P | gl_21633457 |
| 170 | MRT4577_49099P | gl_14717948 |
| 170 | MRT4577_49099P | gl_4995095 |
| 170 | MRT4577_49099P | gl_4995715 |
| 170 | MRT4577_49099P | gl_4995221 |
| 170 | MRT4577_49099P | gl_4995153 |
| 170 | MRT4577_49099P | gl_4995063 |
| 170 | MRT4577_49099P | gl_4995111 |
| 170 | MRT4577_49099P | gl_4995177 |
| 170 | MRT4577_49099P | gl_4995705 |
| 170 | MRT4577_49099P | gl_4995798 |
| 170 | MRT4577_49099P | gl_4995856 |
| 170 | MRT4577_49099P | gl_4995858 |
| 170 | MRT4577_49099P | gl_4995107 |
| 170 | MRT4577_49099P | gl_4995181 |
| 170 | MRT4577_49099P | gl_4995183 |
| 170 | MRT4577_49099P | gl_4995649 |
| 170 | MRT4577_49099P | gl_4995761 |
| 170 | MRT4577_49099P | gl_4995790 |
| 170 | MRT4577_49099P | gl_4995792 |
| 170 | MRT4577_49099P | gl_4995796 |
| 170 | MRT4577_49099P | gl_4995848 |
| 170 | MRT4577_49099P | gl_4995850 |
| 170 | MRT4577_49099P | gl_4995852 |
| 170 | MRT4577_49099P | gl_4995767 |
| 170 | MRT4577_49099P | gl_4995057 |
| 170 | MRT4577_49099P | gl_4995059 |
| 170 | MRT4577_49099P | gl_4995103 |
| 170 | MRT4577_49099P | gl_4995105 |
| 170 | MRT4577_49099P | gl_4995794 |
| 170 | MRT4577_49099P | gl_4995788 |
| 170 | MRT4577_49099P | gl_4995844 |
| 170 | MRT4577_49099P | gl_15608450 |
| 170 | MRT4577_49099P | gl_15835199 |
| 170 | MRT4577_49099P | gl_3850906 |
| 170 | MRT4577_49099P | gl_3850948 |
| 170 | MRT4577_49099P | gl_3850900 |
| 170 | MRT4577_49099P | gl_3850964 |
| 170 | MRT4577_49099P | gl_3850966 |
| 170 | MRT4577_49099P | gl_3850988 |
| 170 | MRT4577_49099P | gl_3850980 |
| 170 | MRT4577_49099P | gl_3850958 |
| 170 | MRT4577_49099P | gl_3850950 |
| 170 | MRT4577_49099P | gl_3850942 |
| 170 | MRT4577_49099P | gl_3850984 |
| 170 | MRT4577_49099P | gl_3850944 |
| 170 | MRT4577_49099P | gl_3850922 |
| 170 | MRT4577_49099P | gl_3850936 |
| 170 | MRT4577_49099P | gl_3850914 |
| 170 | MRT4577_49099P | gl_4731153 |
| 170 | MRT4577_49099P | gl_3850926 |
| 170 | MRT4577_49099P | gl_3850908 |
| 170 | MRT4577_49099P | gl_3850976 |
| 170 | MRT4577_49099P | gl_5001597 |
| 170 | MRT4577_49099P | gl_7708315 |
| 170 | MRT4577_49099P | gl_7708143 |
| 170 | MRT4577_49099P | gl_7708145 |
| 170 | MRT4577_49099P | gl_7708147 |
| 170 | MRT4577_49099P | gl_7708512 |
| 170 | MRT4577_49099P | gl_7708191 |
| 170 | MRT4577_49099P | gl_7708254 |
| 170 | MRT4577_49099P | gl_7708268 |
| 170 | MRT4577_49099P | gl_7708272 |
| 170 | MRT4577_49099P | gl_7708296 |
| 170 | MRT4577_49099P | gl_7708300 |
| 170 | MRT4577_49099P | gl_7708286 |
| 170 | MRT4577_49099P | gl_7708311 |
| 170 | MRT4577_49099P | gl_7708306 |
| 170 | MRT4577_49099P | gl_7708313 |
| 170 | MRT4577_49099P | gl_24940188 |
| 170 | MRT4577_49099P | gl_7708452 |
| 170 | MRT4577_49099P | gl_7708454 |
| 170 | MRT4577_49099P | gl_7708460 |
| 170 | MRT4577_49099P | gl_7708466 |
| 170 | MRT4577_49099P | gl_7708474 |
| 170 | MRT4577_49099P | gl_8517628 |
| 170 | MRT4577_49099P | gl_7708491 |
| 170 | MRT4577_49099P | gl_7708497 |
| 170 | MRT4577_49099P | gl_7708499 |
| 170 | MRT4577_49099P | gl_7708542 |
| 170 | MRT4577_49099P | gl_7708552 |
| 170 | MRT4577_49099P | gl_7708556 |
| 170 | MRT4577_49099P | gl_7708558 |
| 170 | MRT4577_49099P | gl_7708560 |
| 170 | MRT4577_49099P | gl_7708616 |
| 170 | MRT4577_49099P | gl_7708578 |
| 170 | MRT4577_49099P | gl_7708622 |
| 170 | MRT4577_49099P | gl_7708628 |
| 170 | MRT4577_49099P | gl_7708646 |
| 170 | MRT4577_49099P | gl_7708652 |
| 170 | MRT4577_49099P | gl_8452779 |
| 170 | MRT4577_49099P | gl_7708674 |
| 170 | MRT4577_49099P | gl_7688335 |
| 170 | MRT4577_49099P | gl_7708684 |
| 170 | MRT4577_49099P | gl_7708676 |
| 170 | MRT4577_49099P | gl_7688417 |
| 170 | MRT4577_49099P | gl_13518304 |
| 170 | MRT4577_49099P | gl_20269416 |
| 170 | MRT4577_49099P | gl_6687627 |
| 170 | MRT4577_49099P | gl_6706286 |
| 170 | MRT4577_49099P | gl_6687379 |
| 170 | MRT4577_49099P | gl_6688708 |
| 170 | MRT4577_49099P | gl_6687120 |
| 170 | MRT4577_49099P | gl_14717980 |
| 170 | MRT4577_49099P | gl_6687485 |
| 170 | MRT4577_49099P | gl_6687447 |
| 170 | MRT4577_49099P | gl_6688494 |
| 170 | MRT4577_49099P | gl_6689410 |
| 170 | MRT4577_49099P | gl_5001603 |
| 170 | MRT4577_49099P | gl_14587183 |
| 170 | MRT4577_49099P | gl_5001601 |
| 170 | MRT4577_49099P | gl_5758889 |
| 170 | MRT4577_49099P | gl_6017806 |
| 170 | MRT4577_49099P | gl_22406531 |
| 170 | MRT4577_49099P | gl_20384955 |
| 170 | MRT4577_49099P | gl_19033059 |
| 170 | MRT4577_49099P | gl_20384957 |
| 170 | MRT4577_49099P | gl_19033061 |
| 170 | MRT4577_49099P | gl_6689000 |
| 170 | MRT4577_49099P | gl_6017810 |
| 170 | MRT4577_49099P | gl_21684883 |
| 170 | MRT4577_49099P | gl_14718265 |
| 171 | MRT4577_346921P | gl_15810897 |
| 171 | MRT4577_346921P | gl_15810901 |
| 171 | MRT4577_346921P | gl_19698536 |
| 171 | MRT4577_346921P | gl_4096982 |
| 171 | MRT4577_346921P | gl_4103757 |
| 171 | MRT4577_346921P | gl_21667496 |
| 171 | MRT4577_346921P | gl_848999 |
| 171 | MRT4577_346921P | gl_4218162 |
| 171 | MRT4577_346921P | gl_4218160 |
| 171 | MRT4577_346921P | gl_14279306 |
| 171 | MRT4577_346921P | gl_20385590 |
| 171 | MRT4577_346921P | gl_30171291 |
| 171 | MRT4577_346921P | gl_30230270 |
| 171 | MRT4577_346921P | gl_25307920 |
| 171 | MRT4577_346921P | gl_4033721 |
| 171 | MRT4577_346921P | gl_4033725 |
| 171 | MRT4577_346921P | gl_4033710 |
| 171 | MRT4577_346921P | gl_4103486 |
| 171 | MRT4577_346921P | gl_5019431 |
| 171 | MRT4577_346921P | gl_8745072 |
| 171 | MRT4577_346921P | gl_19743774 |
| 171 | MRT4577_346921P | gl_23194453 |
| 171 | MRT4577_346921P | gl_4103346 |
| 171 | MRT4577_346921P | gl_7446520 |
| 171 | MRT4577_346921P | gl_2981131 |
| 171 | MRT4577_346921P | gl_2981133 |
| 171 | MRT4577_346921P | CGPG25.pep |
| 171 | MRT4577_346921P | gl_1345505 |
| 171 | MRT4577_346921P | gl_7446527 |
| 171 | MRT4577_346921P | gl_22328782 |
| 171 | MRT4577_346921P | gl_3915597 |
| 171 | MRT4577_346921P | gl_15231135 |
| 171 | MRT4577_346921P | gl_25307910 |
| 171 | MRT4577_346921P | gl_18406070 |
| 171 | MRT4577_346921P | gl_30689162 |
| 171 | MRT4577_346921P | gl_399096 |
| 171 | MRT4577_346921P | gl_12655901 |
| 171 | MRT4577_346921P | gl_5305232 |
| 171 | MRT4577_346921P | gl_5305242 |
| 171 | MRT4577_346921P | gl_5305260 |
| 171 | MRT4577_346921P | gl_5305244 |
| 171 | MRT4577_346921P | gl_5616513 |
| 171 | MRT4577_346921P | gl_16973298 |
| 171 | MRT4577_346921P | gl_16973296 |
| 171 | MRT4577_346921P | gl_602900 |
| 171 | MRT4577_346921P | MRT3847_56279P.2 |
| 171 | MRT4577_346921P | MRT3847_64872P.3 |
| 171 | MRT4577_346921P | MRT3847_233420P.2 |
| 171 | MRT4577_346921P | MRT3847_64874P.3 |
| 171 | MRT4577_346921P | MRT3847_218209P.1 |
| 171 | MRT4577_346921P | MRT3847_29836P.3 |
| 171 | MRT4577_346921P | MRT3847_225429P.3 |
| 171 | MRT4577_346921P | gl_13161415 |
| 171 | MRT4577_346921P | gl_3913005 |
| 171 | MRT4577_346921P | gl_24967135 |
| 171 | MRT4577_346921P | gl_3913004 |
| 171 | MRT4577_346921P | gl_23428880 |
| 171 | MRT4577_346921P | gl_24967137 |
| 171 | MRT4577_346921P | gl_4097515 |
| 171 | MRT4577_346921P | gl_3913007 |
| 171 | MRT4577_346921P | gl_17827467 |
| 171 | MRT4577_346921P | gl_3913006 |
| 171 | MRT4577_346921P | gl_2129972 |
| 171 | MRT4577_346921P | gl_1067169 |
| 171 | MRT4577_346921P | gl_1568513 |
| 171 | MRT4577_346921P | gl_1364102 |
| 171 | MRT4577_346921P | gl_322801 |
| 171 | MRT4577_346921P | gl_4837612 |
| 171 | MRT4577_346921P | gl_27804365 |
| 171 | MRT4577_346921P | gl_27657747 |
| 171 | MRT4577_346921P | gl_24414622 |
| 171 | MRT4577_346921P | gl_27657745 |
| 171 | MRT4577_346921P | gl_5031217 |
| 171 | MRT4577_346921P | MRT4530_57276P.1 |
| 171 | MRT4577_346921P | gl_2130078 |
| 171 | MRT4577_346921P | MRT4565_47460P.3 |
| 171 | MRT4577_346921P | gl_14041687 |
| 171 | MRT4577_346921P | gl_26517024 |
| 171 | MRT4577_346921P | gl_4101710 |
| 171 | MRT4577_346921P | gl_6970411 |
| 171 | MRT4577_346921P | gl_6970415 |
| 171 | MRT4577_346921P | gl_6970413 |
| 171 | MRT4577_346921P | gl_6970417 |
| 171 | MRT4577_346921P | gl_18650789 |
| 171 | MRT4577_346921P | gl_22091479 |
| 171 | MRT4577_346921P | gl_16549060 |
| 171 | MRT4577_346921P | gl_16549078 |
| 171 | MRT4577_346921P | gl_4887235 |
| 172 | MRT4577_257780P | gl_14626277 |
| 172 | MRT4577_257780P | MRT4530_28144P.1 |
| 172 | MRT4577_257780P | MRT4565_27586P.3 |
| 172 | MRT4577_257780P | MRT4565_9771P.3 |
| 172 | MRT4577_257780P | MRT4565_64073P.2 |
| 172 | MRT4577_257780P | MRT4565_91331P.2 |
| 175 | MRT4577_294774P | gl_7452981 |
| 175 | MRT4577_294774P | gl_7452979 |
| 175 | MRT4577_294774P | gl_13183137 |
| 175 | MRT4577_294774P | gl_29373125 |
| 175 | MRT4577_294774P | gl_25089839 |
| 175 | MRT4577_294774P | gl_21616113 |
| 175 | MRT4577_294774P | gl_11357336 |
| 175 | MRT4577_294774P | gl_25308880 |
| 175 | MRT4577_294774P | gl_15233810 |
| 175 | MRT4577_294774P | MRT3847_39339P.3 |
| 175 | MRT4577_294774P | gl_5830467 |
| 175 | MRT4577_294774P | gl_5830465 |
| 175 | MRT4577_294774P | gl_5830469 |
| 175 | MRT4577_294774P | gl_7446714 |
| 175 | MRT4577_294774P | gl_1272340 |
| 175 | MRT4577_294774P | gl_11278993 |
| 175 | MRT4577_294774P | gl_13506709 |
| 175 | MRT4577_294774P | gl_7677378 |
| 175 | MRT4577_294774P | gl_4850214 |
| 175 | MRT4577_294774P | gl_17646111 |
| 175 | MRT4577_294774P | gl_14627128 |
| 175 | MRT4577_294774P | gl_22265999 |
| 175 | MRT4577_294774P | MRT4530_57126P.1 |
| 175 | MRT4577_294774P | MRT4565_107456P.1 |
| 175 | MRT4577_294774P | gl_15982240 |
| 177 | MRT4577_397598P | MRT3847_29671P.3 |
| 177 | MRT4577_397598P | MRT3847_36085P.3 |
| 177 | MRT4577_397598P | MRT3847_37502P.1 |
| 177 | MRT4577_397598P | gl_10241425 |
| 177 | MRT4577_397598P | MRT4530_77791P.2 |
| 177 | MRT4577_397598P | MRT4530_81676P.1 |
| 177 | MRT4577_397598P | MRT4565_118744P.1 |
| 178 | MRT4577_204611P | gl_28194506 |
| 178 | MRT4577_204611P | gl_28194508 |
| 178 | MRT4577_204611P | gl_15866696 |
| 178 | MRT4577_204611P | gl_27475608 |
| 178 | MRT4577_204611P | gl_28194504 |
| 178 | MRT4577_204611P | gl_7447118 |
| 178 | MRT4577_204611P | gl_8918271 |
| 178 | MRT4577_204611P | gl_8918273 |
| 178 | MRT4577_204611P | gl_30060377 |
| 178 | MRT4577_204611P | MRT4530_76824P.2 |
| 178 | MRT4577_204611P | MRT4530_76823P.2 |
| 178 | MRT4577_204611P | MRT4530_109505P.2 |
| 178 | MRT4577_204611P | MRT4565_29431P.3 |
| 178 | MRT4577_204611P | gl_6456469 |
| 178 | MRT4577_204611P | gl_6456467 |
| 178 | MRT4577_204611P | gl_5922599 |
| 181 | MRT4577_284905P | gl_6822147 |
| 181 | MRT4577_284905P | gl_3702409 |
| 181 | MRT4577_284905P | gl_5834521 |
| 181 | MRT4577_284905P | gl_5834523 |
| 181 | MRT4577_284905P | gl_4584556 |
| 181 | MRT4577_284905P | gl_8980813 |
| 181 | MRT4577_284905P | gl_8980815 |
| 181 | MRT4577_284905P | gl_16225426 |
| 181 | MRT4577_284905P | gl_14329816 |
| 181 | MRT4577_284905P | gl_1469934 |
| 181 | MRT4577_284905P | gl_7447961 |
| 181 | MRT4577_284905P | gl_18087505 |
| 181 | MRT4577_284905P | gl_7447977 |
| 181 | MRT4577_284905P | gl_18379267 |
| 181 | MRT4577_284905P | gl_25410916 |
| 181 | MRT4577_284905P | gl_15219603 |
| 181 | MRT4577_284905P | gl_25402689 |
| 181 | MRT4577_284905P | gl_15220923 |
| 181 | MRT4577_284905P | gl_1352326 |
| 181 | MRT4577_284905P | gl_12655961 |
| 181 | MRT4577_284905P | gl_20149296 |
| 181 | MRT4577_284905P | gl_20149298 |
| 181 | MRT4577_284905P | gl_13548679 |
| 181 | MRT4577_284905P | gl_3900936 |
| 181 | MRT4577_284905P | gl_4883425 |
| 181 | MRT4577_284905P | MRT3847_161472P.3 |
| 181 | MRT4577_284905P | MRT3847_36311P.3 |
| 181 | MRT4577_284905P | gl_7447979 |
| 181 | MRT4577_284905P | gl_119006 |
| 181 | MRT4577_284905P | gl_99998 |
| 181 | MRT4577_284905P | gl_11279328 |
| 181 | MRT4577_284905P | gl_1169445 |
| 181 | MRT4577_284905P | gl_261212 |
| 181 | MRT4577_284905P | gl_20269069 |
| 181 | MRT4577_284905P | gl_32765543 |
| 181 | MRT4577_284905P | gl_1706547 |
| 181 | MRT4577_284905P | gl_4469175 |
| 181 | MRT4577_284905P | gl_10946499 |
| 181 | MRT4577_284905P | gl_29150650 |
| 181 | MRT4577_284905P | gl_22748323 |
| 181 | MRT4577_284905P | gl_6984122 |
| 181 | MRT4577_284905P | gl_11321164 |
| 181 | MRT4577_284905P | gl_461978 |
| 181 | MRT4577_284905P | gl_461979 |
| 181 | MRT4577_284905P | gl_1084399 |
| 181 | MRT4577_284905P | gl_1084400 |
| 181 | MRT4577_284905P | gl_11558184 |
| 181 | MRT4577_284905P | gl_100285 |
| 181 | MRT4577_284905P | gl_100287 |
| 181 | MRT4577_284905P | gl_27529826 |
| 181 | MRT4577_284905P | gl_11071974 |
| 181 | MRT4577_284905P | gl_16903129 |
| 181 | MRT4577_284905P | gl_15150341 |
| 181 | MRT4577_284905P | MRT4530_84009P.2 |
| 181 | MRT4577_284905P | gl_15529115 |
| 181 | MRT4577_284905P | MRT4565_60761P.2 |
| 181 | MRT4577_284905P | gl_14330338 |
| 181 | MRT4577_284905P | gl_20218805 |
| 181 | MRT4577_284905P | gl_688420 |
| 181 | MRT4577_284905P | gl_11279332 |
| 182 | MRT4577_386764P | gl_7573596 |
| 182 | MRT4577_386764P | gl_7573598 |
| 182 | MRT4577_386764P | gl_25287618 |
| 182 | MRT4577_386764P | gl_30695267 |
| 182 | MRT4577_386764P | gl_18400939 |
| 182 | MRT4577_386764P | gl_21593950 |
| 182 | MRT4577_386764P | gl_13447449 |
| 182 | MRT4577_386764P | gl_3668069 |
| 182 | MRT4577_386764P | gl_29427825 |
| 182 | MRT4577_386764P | gl_30421168 |
| 182 | MRT4577_386764P | MRT4530_135930P.1 |
| 182 | MRT4577_386764P | MRT4530_120903P.1 |
| 182 | MRT4577_386764P | gl_21326117 |
| 182 | MRT4577_386764P | MRT4565_103551P.1 |
| 182 | MRT4577_386764P | MRT4565_52855P.3 |
| 182 | MRT4577_386764P | MRT4565_88207P.2 |
| 182 | MRT4577_386764P | gl_28140043 |
| 182 | MRT4577_386764P | gl_28804505 |
| 184 | MRT4577_43098P | gl_27542603 |
| 184 | MRT4577_43098P | gl_22328179 |
| 184 | MRT4577_43098P | MRT3847_52308P.3 |
| 184 | MRT4577_43098P | gl_29893654 |
| 184 | MRT4577_43098P | MRT4530_35848P.1 |
| 184 | MRT4577_43098P | MRT4530_35849P.2 |
| 184 | MRT4577_43098P | MRT4530_121232P.2 |
| 184 | MRT4577_43098P | MRT4530_113489P.2 |
| 184 | MRT4577_43098P | MRT4565_49252P.2 |
| 185 | MRT4577_222465P | MRT3847_10488P.3 |
| 185 | MRT4577_222465P | MRT4530_104720P.2 |
| 185 | MRT4577_222465P | MRT4565_89954P.2 |
| 185 | MRT4577_222465P | MRT4565_71673P.1 |
| 186 | MRT4577_326681P | gl_15240418 |
| 186 | MRT4577_326681P | gl_28071332 |
| 187 | MRT4577_361986P | gl_30385250 |
| 187 | MRT4577_361986P | gl_14495542 |
| 187 | MRT4577_361986P | gl_15227441 |
| 187 | MRT4577_361986P | gl_31540632 |
| 187 | MRT4577_361986P | gl_25004882 |
| 187 | MRT4577_361986P | gl_24935324 |
| 187 | MRT4577_361986P | gl_24940244 |
| 187 | MRT4577_361986P | gl_7488932 |
| 187 | MRT4577_361986P | gl_30421165 |
| 187 | MRT4577_361986P | gl_7434424 |
| 187 | MRT4577_361986P | MRT4530_85948P.1 |
| 187 | MRT4577_361986P | gl_5596996 |
| 187 | MRT4577_361986P | gl_13620169 |
| 189 | MRT4577_300134P | gl_23429044 |
| 189 | MRT4577_300134P | gl_14573437 |
| 189 | MRT4577_300134P | gl_26190149 |
| 189 | MRT4577_300134P | gl_11357139 |
| 189 | MRT4577_300134P | gl_30682129 |
| 189 | MRT4577_300134P | gl_12322049 |
| 189 | MRT4577_300134P | gl_15795149 |
| 189 | MRT4577_300134P | gl_15810509 |
| 189 | MRT4577_300134P | MRT3847_48429P.3 |
| 189 | MRT4577_300134P | gl_6681366 |
| 189 | MRT4577_300134P | gl_6984231 |
| 189 | MRT4577_300134P | gl_4586799 |
| 189 | MRT4577_300134P | MRT4530_81439P.1 |
| 189 | MRT4577_300134P | MRT4530_81446P.2 |
| 189 | MRT4577_300134P | MRT4565_30002P.3 |
| 189 | MRT4577_300134P | gl_7381060 |
| 190 | MRT4577_415225P | gl_32441499 |
| 190 | MRT4577_415225P | gl_4206759 |
| 190 | MRT4577_415225P | gl_28564230 |
| 190 | MRT4577_415225P | gl_28564264 |
| 190 | MRT4577_415225P | gl_32441494 |
| 190 | MRT4577_415225P | MRT3847_52223P.3 |
| 190 | MRT4577_415225P | MRT3847_30045P.3 |
| 190 | MRT4577_415225P | gl_32483423 |
| 190 | MRT4577_415225P | gl_20330757 |
| 190 | MRT4577_415225P | gl_20146358 |
| 190 | MRT4577_415225P | gl_22775591 |
| 190 | MRT4577_415225P | MRT4530_110805P.1 |
| 190 | MRT4577_415225P | MRT4530_87778P.1 |
| 190 | MRT4577_415225P | MRT4530_100513P.2 |
| 190 | MRT4577_415225P | gl_21070389 |
| 190 | MRT4577_415225P | MRT4565_36882P.3 |
| 190 | MRT4577_415225P | MRT4565_110825P.1 |
| 190 | MRT4577_415225P | MRT4565_127690P.1 |
| 190 | MRT4577_415225P | MRT4565_86330P.2 |
| 190 | MRT4577_415225P | MRT4565_40318P.2 |
| 190 | MRT4577_415225P | gl_28564015 |
| 190 | MRT4577_415225P | gl_28564960 |
| 190 | MRT4577_415225P | gl_32441506 |
| 190 | MRT4577_415225P | gl_32441496 |
| 190 | MRT4577_415225P | gl_32441504 |
| 190 | MRT4577_415225P | gl_2274776 |
| 192 | MRT4577_56004P | MRT3847_215323P.2 |
| 192 | MRT4577_56004P | MRT3847_44128P.3 |
| 192 | MRT4577_56004P | MRT4565_57540P.2 |
| 192 | MRT4577_56004P | gl_19112800 |
| 192 | MRT4577_56004P | gl_1808694 |
| 194 | MRT4577_221761P | gl_22331664 |
| 194 | MRT4577_221761P | gl_30692988 |
| 194 | MRT4577_221761P | gl_22330789 |
| 194 | MRT4577_221761P | gl_15242176 |
| 194 | MRT4577_221761P | gl_6094551 |
| 194 | MRT4577_221761P | gl_7487385 |
| 194 | MRT4577_221761P | gl_19578317 |
| 194 | MRT4577_221761P | MRT3847_265345P.2 |
| 194 | MRT4577_221761P | MRT3847_53989P.3 |
| 194 | MRT4577_221761P | MRT3847_6971P.3 |
| 194 | MRT4577_221761P | MRT3847_162726P.3 |
| 194 | MRT4577_221761P | MRT3847_239538P.2 |
| 194 | MRT4577_221761P | MRT3847_253605P.2 |
| 194 | MRT4577_221761P | MRT3847_53988P.3 |
| 194 | MRT4577_221761P | MRT3847_227267P.3 |
| 194 | MRT4577_221761P | MRT3847_30433P.3 |
| 194 | MRT4577_221761P | MRT3847_269768P.1 |
| 194 | MRT4577_221761P | MRT3847_224215P.2 |
| 194 | MRT4577_221761P | MRT3847_272006P.1 |
| 194 | MRT4577_221761P | MRT4530_103360P.1 |
| 194 | MRT4577_221761P | MRT4530_103357P.1 |
| 194 | MRT4577_221761P | MRT4530_103362P.1 |
| 194 | MRT4577_221761P | MRT4530_98210P.1 |
| 194 | MRT4577_221761P | MRT4565_20121P.3 |
| 194 | MRT4577_221761P | MRT4565_90833P.2 |
| 194 | MRT4577_221761P | MRT4565_61922P.2 |
| 194 | MRT4577_221761P | MRT4565_76776P.2 |
| 196 | MRT4577_401949P | MRT3847_241638P.2 |
| 196 | MRT4577_401949P | MRT3847_286535P.1 |
| 196 | MRT4577_401949P | MRT3847_52567P.3 |
| 196 | MRT4577_401949P | MRT3847_255937P.2 |
| 196 | MRT4577_401949P | gl_6782440 |
| 196 | MRT4577_401949P | MRT4530_140459P.1 |
| 196 | MRT4577_401949P | gl_15209148 |
| 196 | MRT4577_401949P | MRT4530_18787P.2 |
| 196 | MRT4577_401949P | MRT4565_19576P.3 |
| 200 | MRT4577_26957P | gl_32477628 |
| 200 | MRT4577_26957P | gl_15896652 |
| 200 | MRT4577_26957P | gl_33113492 |
| 200 | MRT4577_26957P | gl_16610205 |
| 200 | MRT4577_26957P | gl_18407057 |
| 200 | MRT4577_26957P | gl_25345298 |
| 200 | MRT4577_26957P | gl_15292855 |
| 200 | MRT4577_26957P | gl_15236304 |
| 200 | MRT4577_26957P | MRT3847_58239P.2 |
| 200 | MRT4577_26957P | MRT3847_61026P.3 |
| 200 | MRT4577_26957P | MRT3847_249176P.2 |
| 200 | MRT4577_26957P | MRT3847_32267P.3 |
| 200 | MRT4577_26957P | MRT3847_249177P.2 |
| 200 | MRT4577_26957P | gl_8096650 |
| 200 | MRT4577_26957P | MRT4530_97319P.2 |
| 200 | MRT4577_26957P | MRT4530_111084P.2 |
| 200 | MRT4577_26957P | MRT4565_42533P.3 |
| 203 | MRT4577_289436P | gl_7484643 |
| 203 | MRT4577_289436P | gl_7488272 |
| 203 | MRT4577_289436P | MRT4565_141501P.1 |
| 203 | MRT4577_289436P | MRT4565_58034P.2 |
| 204 | MRT4577_221609P | gl_30688566 |
| 204 | MRT4577_221609P | gl_30693084 |
| 204 | MRT4577_221609P | gl_11358184 |
| 204 | MRT4577_221609P | gl_15237549 |
| 204 | MRT4577_221609P | gl_3860313 |
| 204 | MRT4577_221609P | MRT3847_233522P.2 |
| 204 | MRT4577_221609P | MRT3847_286526P.1 |
| 204 | MRT4577_221609P | MRT3847_28679P.3 |
| 204 | MRT4577_221609P | MRT3847_47036P.3 |
| 204 | MRT4577_221609P | MRT4530_7968P.2 |
| 204 | MRT4577_221609P | MRT4565_16821P.3 |
| 204 | MRT4577_221609P | gl_19112558 |
| 204 | MRT4577_221609P | gl_6323275 |
| 204 | MRT4577_221609P | gl_32400328 |
| 204 | MRT4577_221609P | gl_32417454 |
| 204 | MRT4577_221609P | gl_13812075 |
| 204 | MRT4577_221609P | gl_5921507 |
| 205 | MRT4577_28967P | gl_15232517 |
| 205 | MRT4577_28967P | MRT3847_253859P.2 |
| 205 | MRT4577_28967P | MRT3847_198776P.3 |
| 205 | MRT4577_28967P | gl_9663979 |
| 205 | MRT4577_28967P | gl_7489198 |
| 205 | MRT4577_28967P | gl_22128589 |
| 205 | MRT4577_28967P | gl_22128591 |
| 205 | MRT4577_28967P | gl_22128587 |
| 205 | MRT4577_28967P | MRT4530_8279P.1 |
| 205 | MRT4577_28967P | gl_32418640 |
| 208 | MRT4577_45217P | gl_7484972 |
| 208 | MRT4577_45217P | gl_15226178 |
| 208 | MRT4577_45217P | gl_2245390 |
| 208 | MRT4577_45217P | MRT3847_208509P.3 |
| 208 | MRT4577_45217P | gl_20805068 |
| 208 | MRT4577_45217P | gl_19352035 |
| 208 | MRT4577_45217P | MRT4565_34024P.3 |
| 209 | MRT4577_420096P | gl_20330751 |
| 209 | MRT4577_420096P | MRT4530_54698P.1 |
| 209 | MRT4577_420096P | MRT4530_54700P.1 |
| 210 | MRT4577_220452P | MRT3847_2805P.3 |
| 210 | MRT4577_220452P | MRT4530_91499P.1 |
| 212 | MRT4577_5002P | gl_30687843 |
| 212 | MRT4577_5002P | gl_15223786 |
| 212 | MRT4577_5002P | gl_15239624 |
| 212 | MRT4577_5002P | gl_15226967 |
| 212 | MRT4577_5002P | gl_15229157 |
| 212 | MRT4577_5002P | gl_21593407 |
| 212 | MRT4577_5002P | gl_25346630 |
| 212 | MRT4577_5002P | gl_7486722 |
| 212 | MRT4577_5002P | gl_7488751 |
| 212 | MRT4577_5002P | gl_21742732 |
| 212 | MRT4577_5002P | MRT4530_122939P.2 |
| 212 | MRT4577_5002P | MRT4565_43218P.3 |
| 215 | MRT4577_389607P | gl_15223930 |
| 215 | MRT4577_389607P | gl_21553710 |
| 215 | MRT4577_389607P | gl_21536895 |
| 215 | MRT4577_389607P | gl_15242347 |
| 215 | MRT4577_389607P | gl_15237539 |
| 215 | MRT4577_389607P | gl_608671 |
| 215 | MRT4577_389607P | gl_20260650 |
| 215 | MRT4577_389607P | gl_21536979 |
| 215 | MRT4577_389607P | gl_30693784 |
| 215 | MRT4577_389607P | gl_608673 |
| 215 | MRT4577_389607P | gl_25297689 |
| 215 | MRT4577_389607P | MRT3847_30014P.3 |
| 215 | MRT4577_389607P | MRT3847_268909P.1 |
| 215 | MRT4577_389607P | MRT3847_55865P.2 |
| 215 | MRT4577_389607P | MRT3847_35167P.2 |
| 215 | MRT4577_389607P | gl_13676299 |
| 215 | MRT4577_389607P | MRT3847_271867P.1 |
| 215 | MRT4577_389607P | MRT3847_50682P.1 |
| 215 | MRT4577_389607P | MRT3847_85245P.2 |
| 215 | MRT4577_389607P | MRT3847_37580P.3 |
| 215 | MRT4577_389607P | MRT3847_90337P.3 |
| 215 | MRT4577_389607P | gl_6539602 |
| 215 | MRT4577_389607P | gl_4138679 |
| 215 | MRT4577_389607P | gl_15216030 |
| 215 | MRT4577_389607P | gl_15216026 |
| 215 | MRT4577_389607P | gl_15216028 |
| 215 | MRT4577_389607P | gl_7442734 |
| 215 | MRT4577_389607P | gl_7442735 |
| 215 | MRT4577_389607P | gl_4164408 |
| 215 | MRT4577_389607P | gl_20161442 |
| 215 | MRT4577_389607P | gl_27447657 |
| 215 | MRT4577_389607P | gl_27447653 |
| 215 | MRT4577_389607P | gl_7489096 |
| 215 | MRT4577_389607P | gl_7442732 |
| 215 | MRT4577_389607P | gl_4322323 |
| 215 | MRT4577_389607P | gl_4322325 |
| 215 | MRT4577_389607P | MRT4530_114765P.2 |
| 215 | MRT4577_389607P | MRT4565_14138P.3 |
| 216 | MRT4577_405388P | gl_3777497 |
| 216 | MRT4577_405388P | gl_464145 |
| 216 | MRT4577_405388P | gl_13366140 |
| 216 | MRT4577_405388P | gl_10953877 |
| 216 | MRT4577_405388P | gl_29134857 |
| 216 | MRT4577_405388P | gl_10953875 |
| 216 | MRT4577_405388P | gl_3779258 |
| 216 | MRT4577_405388P | gl_30267054 |
| 216 | MRT4577_405388P | gl_30267062 |
| 216 | MRT4577_405388P | gl_30267056 |
| 216 | MRT4577_405388P | gl_30265620 |
| 216 | MRT4577_405388P | gl_30267058 |
| 216 | MRT4577_405388P | gl_25289327 |
| 216 | MRT4577_405388P | gl_30685252 |
| 216 | MRT4577_405388P | gl_7428175 |
| 216 | MRT4577_405388P | gl_18414404 |
| 216 | MRT4577_405388P | gl_602764 |
| 216 | MRT4577_405388P | gl_30683170 |
| 216 | MRT4577_405388P | gl_17224922 |
| 216 | MRT4577_405388P | MRT3847_12543P.1 |
| 216 | MRT4577_405388P | gl_902938 |
| 216 | MRT4577_405388P | gl_231541 |
| 216 | MRT4577_405388P | gl_3913031 |
| 216 | MRT4577_405388P | gl_3913035 |
| 216 | MRT4577_405388P | gl_3913034 |
| 216 | MRT4577_405388P | gl_13489165 |
| 216 | MRT4577_405388P | gl_15082058 |
| 216 | MRT4577_405388P | gl_217936 |
| 216 | MRT4577_405388P | gl_416619 |
| 216 | MRT4577_405388P | gl_10120912 |
| 216 | MRT4577_405388P | gl_217940 |
| 216 | MRT4577_405388P | gl_20530741 |
| 216 | MRT4577_405388P | gl_11322499 |
| 216 | MRT4577_405388P | gl_113786 |
| 216 | MRT4577_405388P | gl_6729696 |
| 216 | MRT4577_405388P | MRT4530_147074P.1 |
| 216 | MRT4577_405388P | gl_169777 |
| 216 | MRT4577_405388P | MRT4530_118075P.1 |
| 216 | MRT4577_405388P | gl_169779 |
| 216 | MRT4577_405388P | gl_478405 |
| 216 | MRT4577_405388P | gl_231540 |
| 216 | MRT4577_405388P | MRT4565_14604P.1 |
| 216 | MRT4577_405388P | gl_3334120 |
| 216 | MRT4577_405388P | MRT4565_106072P.1 |
| 216 | MRT4577_405388P | MRT4565_14599P.3 |
| 216 | MRT4577_405388P | MRT4565_118733P.1 |
| 216 | MRT4577_405388P | MRT4565_58256P.2 |
| 216 | MRT4577_405388P | MRT4565_14593P.3 |
| 216 | MRT4577_405388P | MRT4565_104372P.1 |
| 216 | MRT4577_405388P | MRT4565_118736P.1 |
| 216 | MRT4577_405388P | gl_12006484 |
| 216 | MRT4577_405388P | gl_30267060 |
| 216 | MRT4577_405388P | gl_30267072 |
| 217 | MRT4577_388272P | gl_15225218 |
| 217 | MRT4577_388272P | gl_7488484 |
| 217 | MRT4577_388272P | gl_7488446 |
| 217 | MRT4577_388272P | gl_7488485 |
| 217 | MRT4577_388272P | gl_7488483 |
| 217 | MRT4577_388272P | MRT3847_284959P.1 |
| 217 | MRT4577_388272P | MRT3847_40554P.3 |
| 217 | MRT4577_388272P | MRT3847_7845P.3 |
| 217 | MRT4577_388272P | MRT3847_7846P.2 |
| 217 | MRT4577_388272P | MRT3847_33513P.3 |
| 217 | MRT4577_388272P | MRT3847_249579P.2 |
| 217 | MRT4577_388272P | MRT3847_33514P.2 |
| 217 | MRT4577_388272P | MRT3847_272723P.1 |
| 217 | MRT4577_388272P | gl_7488791 |
| 217 | MRT4577_388272P | gl_12039387 |
| 217 | MRT4577_388272P | MRT4530_114918P.2 |
| 217 | MRT4577_388272P | MRT4565_11213P.3 |
| 218 | MRT4577_61311P | MRT3847_239034P.2 |
| 218 | MRT4577_61311P | MRT3847_199862P.2 |
| 218 | MRT4577_61311P | gl_14906664 |
| 219 | MRT4577_287993P | gl_21220517 |
| 219 | MRT4577_287993P | gl_17227907 |
| 219 | MRT4577_287993P | gl_17232303 |
| 219 | MRT4577_287993P | gl_22959339 |
| 219 | MRT4577_287993P | gl_22962067 |
| 219 | MRT4577_287993P | gl_15616888 |
| 219 | MRT4577_287993P | gl_22965894 |
| 219 | MRT4577_287993P | gl_22972296 |
| 219 | MRT4577_287993P | gl_15921495 |
| 219 | MRT4577_287993P | gl_16329464 |
| 219 | MRT4577_287993P | gl_32473774 |
| 219 | MRT4577_287993P | gl_7674377 |
| 219 | MRT4577_287993P | gl_28380215 |
| 219 | MRT4577_287993P | gl_7674382 |
| 219 | MRT4577_287993P | gl_20808006 |
| 219 | MRT4577_287993P | gl_22977198 |
| 219 | MRT4577_287993P | gl_5764615 |
| 219 | MRT4577_287993P | gl_15676576 |
| 219 | MRT4577_287993P | gl_15793848 |
| 219 | MRT4577_287993P | gl_79917 |
| 219 | MRT4577_287993P | gl_15805966 |
| 219 | MRT4577_287993P | gl_8272441 |
| 219 | MRT4577_287993P | gl_5231208 |
| 219 | MRT4577_287993P | gl_5231187 |
| 219 | MRT4577_287993P | gl_5231184 |
| 219 | MRT4577_287993P | gl_5231202 |
| 219 | MRT4577_287993P | gl_5231181 |
| 219 | MRT4577_287993P | gl_5231193 |
| 219 | MRT4577_287993P | gl_5231190 |
| 219 | MRT4577_287993P | gl_5231205 |
| 219 | MRT4577_287993P | gl_5231196 |
| 219 | MRT4577_287993P | gl_5231199 |
| 219 | MRT4577_287993P | gl_22986693 |
| 219 | MRT4577_287993P | gl_15673444 |
| 219 | MRT4577_287993P | gl_136253 |
| 219 | MRT4577_287993P | gl_18390357 |
| 219 | MRT4577_287993P | gl_7676165 |
| 219 | MRT4577_287993P | gl_15896405 |
| 219 | MRT4577_287993P | gl_15801918 |
| 219 | MRT4577_287993P | gl_22994339 |
| 219 | MRT4577_287993P | gl_22997030 |
| 219 | MRT4577_287993P | gl_22999862 |
| 219 | MRT4577_287993P | gl_136260 |
| 219 | MRT4577_287993P | gl_15924363 |
| 219 | MRT4577_287993P | gl_26986827 |
| 219 | MRT4577_287993P | gl_15837977 |
| 219 | MRT4577_287993P | gl_16800736 |
| 219 | MRT4577_287993P | gl_33240025 |
| 219 | MRT4577_287993P | gl_16803667 |
| 219 | MRT4577_287993P | gl_15901640 |
| 219 | MRT4577_287993P | gl_15903673 |
| 219 | MRT4577_287993P | gl_80601 |
| 219 | MRT4577_287993P | gl_27467972 |
| 219 | MRT4577_287993P | gl_28380195 |
| 219 | MRT4577_287993P | gl_6226270 |
| 219 | MRT4577_287993P | gl_15827655 |
| 219 | MRT4577_287993P | gl_17933944 |
| 219 | MRT4577_287993P | gl_15887378 |
| 219 | MRT4577_287993P | gl_18978077 |
| 219 | MRT4577_287993P | gl_22125938 |
| 219 | MRT4577_287993P | gl_15679655 |
| 219 | MRT4577_287993P | gl_23016131 |
| 219 | MRT4577_287993P | gl_23006623 |
| 219 | MRT4577_287993P | gl_23010914 |
| 219 | MRT4577_287993P | gl_23004962 |
| 219 | MRT4577_287993P | gl_20091808 |
| 219 | MRT4577_287993P | gl_24215987 |
| 219 | MRT4577_287993P | gl_20093841 |
| 219 | MRT4577_287993P | gl_21231972 |
| 219 | MRT4577_287993P | gl_21243443 |
| 219 | MRT4577_287993P | gl_16127773 |
| 219 | MRT4577_287993P | gl_21399162 |
| 219 | MRT4577_287993P | gl_28380210 |
| 219 | MRT4577_287993P | gl_15791717 |
| 219 | MRT4577_287993P | gl_21228923 |
| 219 | MRT4577_287993P | gl_21673370 |
| 219 | MRT4577_287993P | gl_25029429 |
| 219 | MRT4577_287993P | gl_21282989 |
| 219 | MRT4577_287993P | gl_19554226 |
| 219 | MRT4577_287993P | gl_22297982 |
| 219 | MRT4577_287993P | gl_21672546 |
| 219 | MRT4577_287993P | gl_26247590 |
| 219 | MRT4577_287993P | gl_23017117 |
| 219 | MRT4577_287993P | gl_23021827 |
| 219 | MRT4577_287993P | gl_23023764 |
| 219 | MRT4577_287993P | gl_23026706 |
| 219 | MRT4577_287993P | gl_23040075 |
| 219 | MRT4577_287993P | gl_23502956 |
| 219 | MRT4577_287993P | gl_23335097 |
| 219 | MRT4577_287993P | gl_23469383 |
| 219 | MRT4577_287993P | gl_23061852 |
| 219 | MRT4577_287993P | gl_23465333 |
| 219 | MRT4577_287993P | gl_23473439 |
| 219 | MRT4577_287993P | gl_15595233 |
| 219 | MRT4577_287993P | gl_24379020 |
| 219 | MRT4577_287993P | gl_24374549 |
| 219 | MRT4577_287993P | gl_16122431 |
| 219 | MRT4577_287993P | gl_27366338 |
| 219 | MRT4577_287993P | gl_136262 |
| 219 | MRT4577_287993P | gl_15669227 |
| 219 | MRT4577_287993P | gl_7676173 |
| 219 | MRT4577_287993P | gl_28378350 |
| 219 | MRT4577_287993P | gl_23050672 |
| 219 | MRT4577_287993P | gl_23097976 |
| 219 | MRT4577_287993P | gl_28867399 |
| 219 | MRT4577_287993P | gl_28898735 |
| 219 | MRT4577_287993P | gl_16079320 |
| 219 | MRT4577_287993P | gl_15606687 |
| 219 | MRT4577_287993P | gl_11499192 |
| 219 | MRT4577_287993P | gl_136258 |
| 219 | MRT4577_287993P | gl_27375857 |
| 219 | MRT4577_287993P | gl_17988302 |
| 219 | MRT4577_287993P | gl_27904753 |
| 219 | MRT4577_287993P | gl_29345937 |
| 219 | MRT4577_287993P | gl_30019391 |
| 219 | MRT4577_287993P | gl_29654461 |
| 219 | MRT4577_287993P | gl_29832720 |
| 219 | MRT4577_287993P | gl_29840325 |
| 219 | MRT4577_287993P | gl_32034755 |
| 219 | MRT4577_287993P | gl_32029713 |
| 219 | MRT4577_287993P | gl_30248703 |
| 219 | MRT4577_287993P | gl_15897777 |
| 219 | MRT4577_287993P | gl_1004320 |
| 219 | MRT4577_287993P | gl_15642911 |
| 219 | MRT4577_287993P | gl_2120372 |
| 219 | MRT4577_287993P | gl_94733 |
| 219 | MRT4577_287993P | gl_136266 |
| 219 | MRT4577_287993P | gl_401211 |
| 219 | MRT4577_287993P | gl_541528 |
| 219 | MRT4577_287993P | gl_409778 |
| 219 | MRT4577_287993P | gl_3915890 |
| 219 | MRT4577_287993P | gl_11465459 |
| 219 | MRT4577_287993P | gl_11465848 |
| 219 | MRT4577_287993P | gl_27262488 |
| 219 | MRT4577_287993P | gl_28380214 |
| 219 | MRT4577_287993P | gl_23053574 |
| 219 | MRT4577_287993P | gl_136259 |
| 219 | MRT4577_287993P | gl_151617 |
| 219 | MRT4577_287993P | gl_68332 |
| 219 | MRT4577_287993P | gl_14520674 |
| 219 | MRT4577_287993P | gl_5834682 |
| 219 | MRT4577_287993P | gl_28380199 |
| 219 | MRT4577_287993P | gl_136264 |
| 219 | MRT4577_287993P | gl_17546700 |
| 219 | MRT4577_287993P | gl_28380179 |
| 219 | MRT4577_287993P | gl_464911 |
| 219 | MRT4577_287993P | gl_23103063 |
| 219 | MRT4577_287993P | gl_15235430 |
| 219 | MRT4577_287993P | gl_21593559 |
| 219 | MRT4577_287993P | gl_18410104 |
| 219 | MRT4577_287993P | gl_32441888 |
| 219 | MRT4577_287993P | gl_13474231 |
| 219 | MRT4577_287993P | gl_15963782 |
| 219 | MRT4577_287993P | MRT3847_51771P.3 |
| 219 | MRT4577_287993P | MRT3847_243747P.2 |
| 219 | MRT4577_287993P | MRT3847_242965P.2 |
| 219 | MRT4577_287993P | gl_31126752 |
| 219 | MRT4577_287993P | gl_31126747 |
| 219 | MRT4577_287993P | gl_31126749 |
| 219 | MRT4577_287993P | gl_2541878 |
| 219 | MRT4577_287993P | gl_30468052 |
| 219 | MRT4577_287993P | MRT4530_41051P.1 |
| 219 | MRT4577_287993P | MRT4530_19284P.1 |
| 219 | MRT4577_287993P | MRT4530_19282P.1 |
| 219 | MRT4577_287993P | MRT4565_24270P.3 |
| 219 | MRT4577_287993P | MRT4565_3598P.3 |
| 219 | MRT4577_287993P | MRT4565_51329P.3 |
| 219 | MRT4577_287993P | MRT4565_9194P.2 |
| 219 | MRT4577_287993P | MRT4565_6744P.2 |
| 219 | MRT4577_287993P | MRT4565_25946P.3 |
| 219 | MRT4577_287993P | MRT4565_131929P.1 |
| 219 | MRT4577_287993P | MRT4565_28703P.3 |
| 219 | MRT4577_287993P | MRT4565_38061P.3 |
| 219 | MRT4577_287993P | MRT4565_123153P.1 |
| 219 | MRT4577_287993P | MRT4565_118038P.1 |
| 219 | MRT4577_287993P | MRT4565_26535P.2 |
| 219 | MRT4577_287993P | MRT4565_52146P.2 |
| 219 | MRT4577_287993P | MRT4565_115300P.1 |
| 219 | MRT4577_287993P | MRT4565_53782P.2 |
| 219 | MRT4577_287993P | MRT4565_16589P.2 |
| 219 | MRT4577_287993P | MRT4565_113424P.1 |
| 219 | MRT4577_287993P | MRT4565_104502P.1 |
| 219 | MRT4577_287993P | MRT4565_23334P.2 |
| 219 | MRT4577_287993P | gl_23108488 |
| 219 | MRT4577_287993P | gl_23113700 |
| 219 | MRT4577_287993P | gl_23115534 |
| 219 | MRT4577_287993P | gl_775193 |
| 219 | MRT4577_287993P | gl_775168 |
| 219 | MRT4577_287993P | gl_775181 |
| 219 | MRT4577_287993P | gl_775198 |
| 219 | MRT4577_287993P | gl_775174 |
| 219 | MRT4577_287993P | gl_775154 |
| 219 | MRT4577_287993P | gl_20136097 |
| 219 | MRT4577_287993P | gl_20136089 |
| 219 | MRT4577_287993P | gl_20136099 |
| 219 | MRT4577_287993P | gl_20136095 |
| 219 | MRT4577_287993P | gl_20136093 |
| 219 | MRT4577_287993P | gl_20136103 |
| 219 | MRT4577_287993P | gl_14602140 |
| 219 | MRT4577_287993P | gl_68331 |
| 219 | MRT4577_287993P | gl_23122427 |
| 219 | MRT4577_287993P | gl_11513797 |
| 219 | MRT4577_287993P | gl_3212365 |
| 219 | MRT4577_287993P | gl_28373459 |
| 219 | MRT4577_287993P | gl_28373461 |
| 219 | MRT4577_287993P | gl_2098385 |
| 219 | MRT4577_287993P | gl_20135991 |
| 219 | MRT4577_287993P | gl_20135995 |
| 219 | MRT4577_287993P | gl_20135989 |
| 219 | MRT4577_287993P | gl_20136101 |
| 219 | MRT4577_287993P | gl_20136015 |
| 219 | MRT4577_287993P | gl_20136003 |
| 219 | MRT4577_287993P | gl_20135993 |
| 219 | MRT4577_287993P | gl_20136013 |
| 219 | MRT4577_287993P | gl_20136059 |
| 219 | MRT4577_287993P | gl_20136051 |
| 219 | MRT4577_287993P | gl_20136053 |
| 219 | MRT4577_287993P | gl_20136047 |
| 219 | MRT4577_287993P | gl_20136057 |
| 219 | MRT4577_287993P | gl_20136045 |
| 219 | MRT4577_287993P | gl_20136041 |
| 219 | MRT4577_287993P | gl_20136043 |
| 219 | MRT4577_287993P | gl_20136049 |
| 219 | MRT4577_287993P | gl_20136035 |
| 219 | MRT4577_287993P | gl_20136019 |
| 219 | MRT4577_287993P | gl_20136029 |
| 219 | MRT4577_287993P | gl_20136033 |
| 219 | MRT4577_287993P | gl_20136039 |
| 219 | MRT4577_287993P | gl_20136075 |
| 219 | MRT4577_287993P | gl_20136067 |
| 219 | MRT4577_287993P | gl_20136063 |
| 219 | MRT4577_287993P | gl_20136065 |
| 219 | MRT4577_287993P | gl_20136073 |
| 219 | MRT4577_287993P | gl_20136069 |
| 219 | MRT4577_287993P | gl_23128273 |
| 219 | MRT4577_287993P | gl_23124896 |
| 219 | MRT4577_287993P | gl_14574707 |
| 219 | MRT4577_287993P | gl_16554463 |
| 219 | MRT4577_287993P | gl_25409314 |
| 219 | MRT4577_287993P | gl_15641182 |
| 219 | MRT4577_287993P | gl_48491 |
| 219 | MRT4577_287993P | gl_7674396 |
| 219 | MRT4577_287993P | gl_16273337 |
| 219 | MRT4577_287993P | gl_23131139 |
| 219 | MRT4577_287993P | gl_15602442 |
| 219 | MRT4577_287993P | gl_136261 |
| 219 | MRT4577_287993P | gl_20805995 |
| 219 | MRT4577_287993P | gl_15604890 |
| 219 | MRT4577_287993P | gl_20805967 |
| 219 | MRT4577_287993P | gl_20805971 |
| 219 | MRT4577_287993P | gl_20805999 |
| 219 | MRT4577_287993P | gl_20805979 |
| 219 | MRT4577_287993P | gl_6599049 |
| 219 | MRT4577_287993P | gl_6599047 |
| 219 | MRT4577_287993P | gl_15608751 |
| 219 | MRT4577_287993P | gl_16129221 |
| 219 | MRT4577_287993P | gl_23133994 |
| 219 | MRT4577_287993P | gl_15645891 |
| 219 | MRT4577_287993P | gl_15612263 |
| 219 | MRT4577_287993P | gl_32130302 |
| 219 | MRT4577_287993P | gl_15614227 |
| 219 | MRT4577_287993P | gl_28971666 |
| 219 | MRT4577_287993P | gl_16760154 |
| 219 | MRT4577_287993P | gl_32423711 |
| 219 | MRT4577_287993P | gl_23137115 |
| 219 | MRT4577_287993P | gl_16765071 |

[0219] TABLE 5

| Seq_Num | Seq_ID | Organism_Name |
|---|---|---|
| 220 | gl_27366338 | Vibrio vulnificus CMCP6 |
| 221 | gl_22991721 | Enterococcus faecium |
| 222 | gl_15425588 | Pentaphragma ellipticum |
| 223 | gl_15897860 | Sulfolobus solfataricus |
| 224 | gl_23037705 | Oenococcus oeni MCW |
| 225 | gl_16081190 | Thermoplasma acidophilum |
| 226 | gl_15888589 | Agrobacterium tumefaciens str. C58 (Cereon) |
| 227 | gl_14718201 | Quiina pteridophylla |
| 228 | MRT4530_27655P.2 | Oryza sativa |
| 229 | gl_4063556 | Ochroma pyramidale |
| 230 | gl_32473774 | Pirellula sp. |
| 231 | gl_15603842 | Pasteurella multocida |
| 232 | gl_5596996 | Sorghum bicolor |
| 233 | gl_14718165 | Pedicularis coronata |
| 234 | gl_23055438 | Geobacter metallireducens |
| 235 | gl_23006404 | Magnetospirillum magnetotacticum |
| 236 | gl_4995103 | Cola nitida |
| 237 | gl_5231187 | Streptococcus pneumoniae |
| 238 | gl_20807813 | Thermoanaerobacter tengcongensis |
| 239 | gl_30230270 | Ginkgo biloba |
| 240 | gl_3850934 | Carnarvonia araliifolia |
| 241 | gl_26517024 | Brassica rapa subsp. pekinensis |
| 242 | gl_15422208 | Argophyllum sp. Telford 5462 |
| 243 | gl_22994339 | Xylella fastidiosa Dixon |
| 244 | MRT3847_12543P.1 | Glycine max |
| 245 | gl_29420859 | Saccharomyces dairenensis |
| 246 | gl_7594817 | Salmonella typhimurium |
| 247 | gl_23099057 | Oceanobacillus iheyensis HTE831 |
| 248 | gl_19553586 | Corynebacterium glutamicum ATCC 13032 |
| 249 | gl_4731151 | Berzelia lanuglnosa |
| 250 | gl_28380179 | Synechococcus sp. PCC 7002 |
| 251 | gl_22961512 | Rhodopseudomonas palustris |
| 252 | gl_11071974 | Nicotiana tabacum |
| 253 | gl_775174 | Escherichia coli |
| 254 | gl_15890531 | Agrobacterium tumefaciens str. C58 (Cereon) |
| 255 | gl_23021869 | Clostridium thermocellum ATCC 27405 |
| 256 | gl_12004151 | Primula gaubaeana |
| 257 | gl_28378548 | Lactobacillus plantarum WCFS1 |
| 258 | gl_10120912 | Ipomoea batatas |
| 259 | gl_11358184 | Arabidopsis thaliana |
| 260 | gl_7339715 | Oryza sativa (japonica cultivar-group) |
| 261 | gl_7676173 | Methanocaldococcus jannaschii |
| 262 | gl_20136063 | Shigella sonnei |
| 263 | gl_7488791 | Pisum sativum |
| 264 | gl_28564960 | Saccharomyces kluyveri |
| 265 | gl_16330679 | Synechocystis sp. PCC 6803 |
| 266 | gl_30263833 | Bacillus anthracis str. Ames |
| 267 | gl_5758908 | Riedelia aff. wrayii SBG 83-203 |
| 268 | gl_18390357 | Bacillus subtilis |
| 269 | gl_1929027 | Beta vulgaris |
| 270 | MRT4530_111084P.2 | Oryza sativa |
| 271 | gl_416619 | Ipomoea batatas |
| 272 | gl_4101710 | Pinus resinosa |
| 273 | gl_4063522 | Acer saccharum |
| 274 | gl_21910448 | Streptococcus pyogenes MGAS315 |
| 275 | gl_28380195 | Agrobacterium tumefaciens str. C58 |
| 276 | gl_17227907 | Nostoc sp. PCC 7120 |
| 277 | gl_15793205 | Neisseria meningltidis Z2491 |
| 278 | gl_25386572 | Arabidopsis thaliana |
| 279 | gl_7708499 | Morus nigra |
| 280 | gl_28564948 | Saccharomyces kluyveri |
| 281 | gl_586209 | Candida tropicalis |
| 282 | gl_23017722 | Thermobifida fusca |
| 283 | gl_22537459 | Streptococcus agalactiae 2603V/R |
| 284 | gl_8918271 | Pisum sativum |
| 285 | gl_27262322 | Heliobacillus mobilis |
| 286 | gl_21536979 | Arabidopsis thaliana |
| 287 | gl_15837426 | Xylella fastidiosa 9a5c |
| 288 | gl_28572441 | Tropheryma whipplei TW08/27 |
| 289 | gl_8452749 | Simarouba glauca |
| 290 | gl_1352828 | Cyanidium caldarium |
| 291 | gl_15810901 | Antirrhinum majus subsp. cirrhigerum |
| 292 | gl_14718111 | Lilium superbum |
| 293 | gl_14627128 | Solanum tuberosum |
| 294 | gl_14717933 | Ancistrocladus korupensis |
| 295 | gl_28373461 | Salmonella typhimurium |
| 296 | gl_1742753 | Escherichia coli |
| 297 | MRT4530_15443P.1 | Oryza sativa |
| 298 | gl_6689056 | Paulownia tomentosa |
| 299 | gl_27435914 | Welwitschia mirabilis |
| 300 | MRT4530_81676P.1 | Oryza sativa |
| 301 | gl_608673 | Arabidopsis thaliana |
| 302 | gl_28493257 | Tropheryma whipplei str. Twist |
| 303 | gl_23026706 | Microbulbifer degradans 2-40 |
| 304 | gl_22994632 | Xylella fastidiosa Dixon |
| 305 | gl_1067169 | Petunia x hybrida |
| 306 | gl_3850936 | Sphalmium racemosum |
| 307 | gl_7447977 | Cucumis sativus |
| 308 | gl_136262 | Methanococcus voltae |
| 309 | gl_21954721 | Mesotaenium caldariorum |
| 310 | gl_6782440 | Nicotiana glauca |
| 311 | gl_22128587 | Petunia x hybrida |
| 312 | gl_15805966 | Deinococcus radiodurans |
| 313 | gl_21402518 | Bacillus anthracis str. A2012 |
| 314 | gl_6634078 | Citrus x paradisi |
| 315 | gl_19033089 | Klebsormidium flaccidum |
| 316 | gl_2462107 | Bacillus cereus |
| 317 | gl_20136101 | Shigella boydii |
| 318 | MRT3847_85245P.2 | Glycine max |
| 319 | gl_401211 | Antithamnion sp. |
| 320 | gl_21220496 | Streptomyces coelicolor A3(2) |
| 321 | MRT4530_41051P.1 | Oryza sativa |
| 322 | gl_21633361 | Seddera hirsuta |
| 323 | gl_23005242 | Magnetospirillum magnetotacticum |
| 324 | MRT3847_36311P.3 | Glycine max |
| 325 | gl_12585416 | Borrelia burgdorferi |
| 326 | gl_7708272 | Dichapetalum brownii |
| 327 | gl_29373125 | Citrus sinensis |
| 328 | gl_322801 | Antirrhinum majus |
| 329 | gl_23099532 | Oceanobacillus iheyensis HTE831 |
| 330 | MRT4565_77691P.2 | Triticum aestivum |
| 331 | gl_2493123 | Hordeum vulgare |
| 332 | gl_7489168 | Nicotiana tabacum |
| 333 | gl_15903673 | Streptococcus pneumoniae R6 |
| 334 | gl_16416730 | Equisetum x ferrissii |
| 335 | gl_16126204 | Caulobacter crescentus CB15 |
| 336 | gl_23108079 | Novosphingobium aromaticivorans |
| 337 | gl_22968361 | Rhodospirillum rubrum |
| 338 | gl_20135995 | Shigella boydii |
| 339 | gl_15828368 | Mycobacterium leprae |
| 340 | gl_4995221 | Hibiscus punaluuensis |
| 341 | gl_4063524 | Aesculus pavia |
| 342 | gl_14718265 | Xanthoceras sorbifolium |
| 343 | gl_19114337 | Schizosaccharomyces pombe |
| 344 | gl_21633433 | Erycibe glomerata |
| 345 | gl_7708284 | Erythroxylum confusum |
| 346 | gl_25308880 | Arabidopsis thaliana |
| 347 | gl_31540632 | Brassica napus |
| 348 | gl_22994398 | Xylella fastidiosa Dixon |
| 349 | gl_21633349 | Hildebrandtia valo |
| 350 | gl_15150341 | Camellia sinensis |
| 351 | gl_20259460 | Arabidopsis thaliana |
| 352 | gl_4995053 | Adansonia rubrostipa |
| 353 | MRT3847_13189P.3 | Glycine max |
| 354 | gl_15237549 | Arabidopsis thaliana |
| 355 | gl_3850966 | Euplassa inaequalis |
| 356 | gl_7708189 | Carpenteria californica |
| 357 | gl_22651734 | Drosophyllum lusitanicum |
| 358 | gl_4995097 | Durio zibethinus |
| 359 | gl_16943668 | Caesia contorta |
| 360 | MRT3847_41566P.3 | Glycine max |
| 361 | gl_15887403 | Agrobacterium tumefaciens str. C58 (Cereon) |
| 362 | gl_28378738 | Lactobacillus plantarum WCFS1 |
| 363 | gl_4586602 | Cicer arietinum |
| 364 | MRT3847_253605P.2 | Glycine max |
| 365 | gl_6970417 | Rosa rugosa |
| 366 | MRT4530_81446P.2 | Oryza sativa |
| 367 | gl_14718232 | Stellaria media |
| 368 | gl_24940162 | Borago officinalis |
| 369 | MRT4565_29431P.3 | Triticum aestivum |
| 370 | MRT4530_97319P.2 | Oryza sativa |
| 371 | gl_16417186 | Saccharomyces sp. DH1-1A |
| 372 | gl_20136095 | Escherichia coli |
| 373 | gl_14717935 | Androstachys johnsonii |
| 374 | gl_23503621 | Carteria cerasiformis |
| 375 | gl_21741785 | Oryza sativa (japonica cultivar-group) |
| 376 | gl_13506709 | Lycopersicon esculentum |
| 377 | gl_27526583 | Kluyveromyces dobzhanskii |
| 378 | gl_21672587 | Buchnera aphidicola str. Sg (Schizaphis graminum) |
| 379 | MRT3847_63803P.3 | Glycine max |
| 380 | gl_14573437 | Chlamydomonas reinhardtii |
| 381 | gl_6822147 | Hieracium piloselloides |
| 382 | gl_22128589 | Petunia x hybrida |
| 383 | gl_15615026 | Bacillus halodurans |
| 384 | gl_3900936 | Cicer arietinum |
| 385 | gl_31126752 | Oryza sativa (japonica cultivar-group) |
| 386 | gl_7708568 | Quisqualis indica |
| 387 | gl_1084399 | Lycopersicon esculentum |
| 388 | MRT4565_98294P.2 | Triticum aestivum |
| 389 | gl_4850214 | Lycopersicon esculentum |
| 390 | gl_19033059 | Nitella opaca |
| 391 | gl_15841981 | Mycobacterium tuberculosis CDC1551 |
| 392 | MRT3847_265345P.2 | Glycine max |
| 393 | gl_15223930 | Arabidopsis thaliana |
| 394 | MRT3847_35167P.2 | Glycine max |
| 395 | gl_23111624 | Desulfitobacterium hafniense |
| 396 | gl_15893920 | Clostridium acetobutylicum |
| 397 | gl_20384961 | Coleochaete sp. 18a1 |
| 398 | gl_22959136 | Rhodobacter sphaeroides |
| 399 | gl_1171780 | Enterococcus hirae |
| 400 | gl_28572631 | Tropheryma whipplei TW08/27 |
| 401 | gl_24940184 | Emmenanthe penduliflora |
| 402 | gl_23063854 | Pseudomonas fluorescens PfO-1 |
| 403 | gl_4995794 | Rulingla sp. Chase 2196 |
| 404 | gl_4033721 | Picea mariana |
| 405 | gl_18312204 | Pyrobaculum aerophilum str. IM2 |
| 406 | gl_21684869 | Anarthria scabra |
| 407 | gl_15831818 | Escherichia coli O157:H7 |
| 408 | gl_388977 | Escherichia coli |
| 409 | gl_6984231 | Euphorbia esula |
| 410 | MRT3847_255937P.2 | Glycine max |
| 411 | MRT3847_284959P.1 | Glycine max |
| 412 | MRT4565_51329P.3 | Triticum aestivum |
| 413 | gl_7488484 | Brassica napus |
| 414 | gl_21231972 | Xanthomonas campestris pv. campestris str. |
| | | ATCC 33913 |
| 415 | gl_23021511 | Clostridium thermocellum ATCC 27405 |
| 416 | MRT4565_24817P.3 | Triticum aestivum |
| 417 | gl_14717997 | Celosia argentea |
| 418 | gl_28188341 | Coleochaete sp. 528a3 |
| 419 | gl_29420865 | Saccharomyces unisporus |
| 420 | gl_22961554 | Rhodopseudomonas palustris |
| 421 | MRT3847_64874P.3 | Glycine max |
| 422 | gl_32475580 | Pirellula sp. |
| 423 | MRT3847_286535P.1 | Glycine max |
| 424 | gl_16800375 | Listeria innocua |
| 425 | gl_217936 | Ipomoea batatas |
| 426 | gl_4731153 | Dillenia retusa |
| 427 | gl_15612353 | Helicobacter pylori J99 |
| 428 | gl_16803610 | Listeria monocytogenes EGD-e |
| 429 | gl_29347953 | Bacteroides thetaiotaomicron VPI-5482 |
| 430 | gl_25004882 | Cicer arietinum |
| 431 | gl_48491 | Vibrio parahaemolyticus |
| 432 | MRT3847_239034P.2 | Glycine max |
| 433 | gl_22406531 | Ferroplasma acidarmanus |
| 434 | MRT4565_107456P.1 | Triticum aestivum |
| 435 | gl_12004153 | Primula palinuri |
| 436 | gl_15810509 | Arabidopsis thaliana |
| 437 | gl_19920171 | Oryza sativa (japonica cultivar-group) |
| 438 | gl_14718042 | Epilobium angustifolium |
| 439 | gl_19115258 | Schizosaccharomyces pombe |
| 440 | gl_7708512 | Planchonella pohlmaniana |
| 441 | gl_23021249 | Clostridium thermocellum ATCC 27405 |
| 442 | MRT3847_26155P.3 | Glycine max |
| 443 | gl_19033091 | Klebsormidium subtilissimum |
| 444 | gl_28188329 | Coleochaete sp. 327d3 |
| 445 | gl_4469175 | Hevea brasiliensis |
| 446 | gl_13548679 | Pyrus pyrifolia |
| 447 | gl_4995788 | Rhopalocarpus sp. Chase 906 |
| 448 | gl_15605757 | Aquifex aeolicus VF5 |
| 449 | gl_17545291 | Ralstonia solanacearum |
| 450 | gl_16803667 | Listeria monocytogenes EGD-e |
| 451 | gl_15216026 | Vicia faba var. minor |
| 452 | MRT3847_200246P.2 | Glycine max |
| 453 | gl_18077607 | Valdivia gayana |
| 454 | gl_15615614 | Bacillus halodurans |
| 455 | gl_23000020 | Magnetococcus sp. MC-1 |
| 456 | gl_14717931 | Allium altaicum |
| 457 | MRT4530_135930P.1 | Oryza sativa |
| 458 | gl_6689562 | Verbascum thapsus |
| 459 | gl_775154 | Escherichia coli |
| 460 | gl_27528500 | Torulaspora delbrueckii |
| 461 | gl_23099102 | Oceanobacillus iheyensis HTE831 |
| 462 | gl_172907 | Saccharomyces cerevisiae |
| 463 | MRT3847_70323P.2 | Glycine max |
| 464 | gl_9955367 | Escherichia coli |
| 465 | gl_7442734 | Ricinus communis |
| 466 | gl_22993136 | Enterococcus faecium |
| 467 | gl_21243443 | Xanthomonas axonopodis pv. citri str. 306 |
| 468 | gl_21221074 | Streptomyces coelicolor A3(2) |
| 469 | gl_15611004 | Mycobacterium tuberculosis H37Rv |
| 470 | gl_6320016 | Saccharomyces cerevisiae |
| 471 | MRT3847_44128P.3 | Glycine max |
| 472 | gl_5869971 | Scherffelia dubia |
| 473 | gl_14718072 | Heteropyxis natalensis |
| 474 | gl_32034755 | Actinobacillus pleuropneumoniae serovar 1 str. 4074 |
| 475 | gl_4033435 | Agrobacterium vitis |
| 476 | gl_9229839 | Thermoplasma acidophilum |
| 477 | gl_21616113 | Cucumis melo |
| 478 | gl_2459981 | Pseudomonas aeruglnosa |
| 479 | gl_15826905 | Mycobacterium leprae |
| 480 | gl_15242176 | Arabidopsis thaliana |
| 481 | MRT3847_267642P.1 | Glycine max |
| 482 | gl_8517408 | Clavija eggersiana |
| 483 | gl_15829106 | Mycoplasma pulmonis |
| 484 | gl_20135993 | Shigella boydii |
| 485 | gl_2497537 | Asperglllus niger |
| 486 | gl_25010985 | Streptococcus agalactiae NEM316 |
| 487 | gl_100287 | Nicotiana sp. |
| 488 | gl_21633431 | Erycibe hellwigli |
| 489 | gl_15614852 | Bacillus halodurans |
| 490 | MRT3847_30045P.3 | Glycine max |
| 491 | MRT4530_8279P.1 | Oryza sativa |
| 492 | gl_6323275 | Saccharomyces cerevisiae |
| 493 | gl_116144 | Xanthobacter flavus |
| 494 | gl_23043296 | Trichodesmium erythraeum IMS101 |
| 495 | gl_3850964 | Cardwellia sublimis |
| 496 | gl_16765661 | Salmonella typhimurium LT2 |
| 497 | gl_3850900 | Bellendena montana |
| 498 | gl_23137026 | Cytophaga hutchinsonii |
| 499 | gl_23103564 | Azotobacter vinelandii |
| 500 | gl_22964886 | Rhodopseudomonas palustris |
| 501 | gl_15924244 | Staphylococcus aureus subsp. aureus Mu50 |
| 502 | gl_14718230 | Spigelia marilandica |
| 503 | gl_7592738 | Nepenthes alata |
| 504 | MRT4530_109505P.2 | Oryza sativa |
| 505 | gl_27447653 | Lycopersicon esculentum |
| 506 | gl_7484972 | Arabidopsis thaliana |
| 507 | gl_32490903 | Wigglesworthia glossinidia endosymbiont |
| | | of Glossina brevipalpis |
| 508 | gl_10241425 | Oryza sativa (indica cultivar-group) |
| 509 | gl_21633419 | Dicranostyles villosus |
| 510 | gl_5758884 | Hedychium flavum |
| 511 | gl_15594640 | Borrelia burgdorferi B31 |
| 512 | gl_24940204 | Hydrolea sp. Chase 3245 |
| 513 | gl_20136093 | Escherichia coli |
| 514 | gl_12585563 | Methanocaldococcus jannaschii |
| 515 | gl_23336124 | Bifidobacterium longum DJO10A |
| 516 | gl_6017814 | Nelumbo lutea |
| 517 | gl_7708308 | Garrya elliptica |
| 518 | gl_15866696 | Avena strigosa |
| 519 | gl_7708339 | Hymenanthera alpina |
| 520 | gl_26553530 | Mycoplasma penetrans |
| 521 | gl_12585391 | Desulfurococcus sp. SY |
| 522 | gl_584810 | Galdieria sulphuraria |
| 523 | gl_15642920 | Thermotoga maritima |
| 524 | gl_23465101 | Bifidobacterium longum NCC2705 |
| 525 | MRT4565_52855P.3 | Triticum aestivum |
| 526 | gl_23058851 | Pseudomonas fluorescens PfO-1 |
| 527 | gl_21223783 | Streptomyces coelicolor A3(2) |
| 528 | gl_4063552 | Muntingla calabura |
| 529 | gl_15924687 | Staphylococcus aureus subsp. aureus Mu50 |
| 530 | gl_136259 | Klebsiella aerogenes |
| 531 | MRT4565_39839P.3 | Triticum aestivum |
| 532 | gl_21672546 | Buchnera aphidicola str. Sg (Schizaphis graminum) |
| 533 | gl_7708181 | Betula pendula |
| 534 | gl_23136411 | Cytophaga hutchinsonii |
| 535 | gl_2541878 | Cyanidioschyzon merolae |
| 536 | gl_7708177 | Brexia madagascariensis |
| 537 | gl_7436320 | Desulfurococcus mobilis |
| 538 | gl_15921725 | Sulfolobus tokodaii |
| 539 | gl_23019853 | Thermobifida fusca |
| 540 | gl_21232615 | Xanthomonas campestris pv. campestris |
| | | str. ATCC 33913 |
| 541 | gl_16127773 | Caulobacter crescentus CB15 |
| 542 | gl_21684925 | Leersia oryzoides |
| 543 | gl_12004121 | Cortusa turkestanica |
| 544 | gl_19705311 | Fusobacterium nucleatum subsp. |
| | | nucleatum ATCC 25586 |
| 545 | gl_7708634 | Sambucus nigra |
| 546 | gl_15425590 | Phyllachne uliglnosa |
| 547 | gl_27375857 | Bradyrhizobium japonicum USDA 110 |
| 548 | gl_17232340 | Nostoc sp. PCC 7120 |
| 549 | gl_22989508 | Burkholderia fungorum |
| 550 | gl_12004143 | Jacquinia keyensis |
| 551 | gl_24940244 | Pisum sativum |
| 552 | gl_27467972 | Staphylococcus epidermidis ATCC 12228 |
| 553 | gl_30351915 | Periboea paucifolia |
| 554 | gl_68332 | Pseudomonas aeruglnosa |
| 555 | gl_8452704 | Nomocharis pardanthina |
| 556 | gl_15892357 | Rickettsia conorii |
| 557 | gl_15609923 | Mycobacterium tuberculosis H37Rv |
| 558 | gl_28897130 | Vibrio parahaemolyticus RIMD 2210633 |
| 559 | gl_4033428 | Photobacterium leiognathi |
| 560 | gl_1730064 | Bacillus licheniformis |
| 561 | gl_7674377 | Buchnera aphidicola (Diuraphis noxia) |
| 562 | gl_15827378 | Mycobacterium leprae |
| 563 | MRT3847_227267P.3 | Glycine max |
| 564 | MRT4530_84009P.2 | Oryza sativa |
| 565 | gl_23023645 | Leuconostoc mesenteroides subsp. |
| | | mesenteroides ATCC 8293 |
| 566 | gl_6688704 | Myoporum mauritianum |
| 567 | MRT4565_91331P.2 | Triticum aestivum |
| 568 | gl_16081945 | Thermoplasma acidophilum |
| 569 | gl_20136047 | Shigella dysenteriae |
| 570 | gl_29420871 | Saccharomyces pastorianus |
| 571 | gl_20091808 | Methanosarcina acetivorans C2A |
| 572 | gl_7708514 | Napoleonaea vogelii |
| 573 | gl_4206588 | Atalantia ceylanica |
| 574 | gl_32488077 | Oryza sativa (japonica cultivar-group) |
| 575 | gl_15837977 | Xylella fastidiosa 9a5c |
| 576 | gl_22330789 | Arabidopsis thaliana |
| 577 | gl_2274776 | Candida albicans |
| 578 | gl_22957596 | Rhodobacter sphaeroides |
| 579 | gl_3122311 | Methylobacterium extorquens |
| 580 | gl_30692988 | Arabidopsis thaliana |
| 581 | gl_12039387 | Oryza sativa (japonica cultivar-group) |
| 582 | gl_24940176 | Echiochilon collenettei |
| 583 | MRT3847_250868P.2 | Glycine max |
| 584 | gl_24414622 | Helianthus annuus |
| 585 | gl_231540 | Secale cereale |
| 586 | gl_21633379 | Stylisma patens |
| 587 | gl_23017104 | Thermobifida fusca |
| 588 | gl_6017810 | Limeum sp. Hoot 983 |
| 589 | gl_22998791 | Magnetococcus sp. MC-1 |
| 590 | gl_264676 | Saccharomyces cerevisiae |
| 591 | gl_1352326 | Brassica rapa |
| 592 | MRT3847_48429P.3 | Glycine max |
| 593 | gl_16416758 | Polytrichum pallidisetum |
| 594 | gl_22298059 | Thermosynechococcus elongatus BP-1 |
| 595 | gl_5231208 | Streptococcus pneumoniae |
| 596 | gl_20807120 | Thermoanaerobacter tengcongensis |
| 597 | gl_23131139 | Prochlorococcus marinus str. MIT 9313 |
| 598 | MRT3847_234305P.2 | Glycine max |
| 599 | MRT4565_115300P.1 | Triticum aestivum |
| 600 | gl_5758889 | Heliconia rostrata |
| 601 | gl_23131322 | Prochlorococcus marinus str. MIT 9313 |
| 602 | gl_23097976 | Oceanobacillus iheyensis HTE831 |
| 603 | gl_7688031 | Peltoboykinia tellimoides |
| 604 | gl_6319279 | Saccharomyces cerevisiae |
| 605 | gl_32418640 | Neurospora crassa |
| 606 | gl_23111737 | Desulfitobacterium hafniense |
| 607 | gl_32490757 | Wigglesworthia glossinidia endosymbiont of |
| | | Glossina brevipalpis |
| 608 | gl_7687974 | Degeneria vitiensis |
| 609 | gl_15676576 | Neisseria meningltidis MC58 |
| 610 | gl_6634488 | Poncirus trifoliata |
| 611 | gl_7452979 | Hordeum vulgare subsp. vulgare |
| 612 | gl_29420851 | Saccharomyces cerevisiae |
| 613 | gl_17827467 | Petunia x hybrida |
| 614 | gl_32476398 | Pirellula sp. |
| 615 | gl_6633813 | Arabidopsis thaliana |
| 616 | gl_26988777 | Pseudomonas putida KT2440 |
| 617 | gl_28209952 | Clostridium tetani E88 |
| 618 | gl_21667496 | Cycas edentata |
| 619 | gl_23014985 | Magnetospirillum magnetotacticum |
| 620 | MRT4530_143108P.1 | Oryza sativa |
| 621 | gl_16903129 | Sambucus nigra |
| 622 | gl_20135991 | Shigella boydii |
| 623 | MRT4530_35848P.1 | Oryza sativa |
| 624 | gl_5758888 | Heliconia paka |
| 625 | gl_15828737 | Mycoplasma pulmonis |
| 626 | gl_16803319 | Listeria monocytogenes EGD-e |
| 627 | gl_15801918 | Escherichia coli O157:H7 EDL933 |
| 628 | gl_15793848 | Neisseria meningltidis Z2491 |
| 629 | gl_29655069 | Coxiella burnetii RSA 493 |
| 630 | gl_20149296 | Malus x domestica |
| 631 | MRT4565_104372P.1 | Triticum aestivum |
| 632 | gl_15233810 | Arabidopsis thaliana |
| 633 | gl_5758854 | Aloe vera |
| 634 | gl_15677237 | Neisseria meningltidis MC58 |
| 635 | gl_20136049 | Shigella dysenteriae |
| 636 | gl_5231190 | Streptococcus pneumoniae |
| 637 | gl_22094360 | Oryza sativa (japonica cultivar-group) |
| 638 | gl_32029324 | Haemophilus somnus 2336 |
| 639 | gl_7488485 | Brassica napus |
| 640 | gl_15675235 | Streptococcus pyogenes M1 GAS |
| 641 | gl_23335097 | Bifidobacterium longum DJO10A |
| 642 | gl_28140043 | Elaeis guineensis |
| 643 | gl_6539602 | Vicia faba |
| 644 | gl_775198 | Escherichia coli |
| 645 | gl_20092686 | Methanosarcina acetivorans C2A |
| 646 | gl_21633417 | Jacquemontia reclinata |
| 647 | gl_15805727 | Deinococcus radiodurans |
| 648 | gl_30468060 | Cyanidioschyzon merolae |
| 649 | gl_18310529 | Clostridium perfringens str. 13 |
| 650 | gl_6681366 | Pisum sativum |
| 651 | gl_28202179 | Anthoceros formosae |
| 652 | gl_29832759 | Streptomyces avermitilis MA-4680 |
| 653 | gl_15640512 | Vibrio cholerae |
| 654 | gl_3377757 | Zymomonas mobilis |
| 655 | gl_15887378 | Agrobacterium tumefaciens str. C58 (Cereon) |
| 656 | MRT3847_37580P.3 | Glycine max |
| 657 | gl_1430917 | Ochrosphaera neapolitana |
| 658 | gl_15606687 | Aquifex aeolicus VF5 |
| 659 | gl_1084400 | Lycopersicon esculentum |
| 660 | gl_2497540 | Ricinus communis |
| 661 | gl_27884018 | Lycopersicon esculentum |
| 662 | gl_8980815 | Castanea sativa |
| 663 | gl_23502605 | Brucella suis 1330 |
| 664 | gl_4063550 | Helianthemum grandiflorum |
| 665 | gl_22977198 | Ralstonia metallidurans |
| 666 | gl_15645891 | Helicobacter pylori 26695 |
| 667 | gl_7688421 | Viscainoa geniculata |
| 668 | gl_15614926 | Bacillus halodurans |
| 669 | gl_1196314 | Borrelia burgdorferi |
| 670 | gl_29654461 | Coxiella burnetii RSA 493 |
| 671 | gl_8918273 | Pisum sativum |
| 672 | gl_19075895 | Schizosaccharomyces pombe |
| 673 | gl_11357139 | Chenopodium rubrum |
| 674 | gl_5758886 | Heliconia irrasa |
| 675 | gl_15673444 | Lactococcus lactis subsp. lactis |
| 676 | gl_6686963 | Barleria prionitis |
| 677 | gl_6016879 | Bacillus sp. |
| 678 | gl_5231199 | Streptococcus pneumoniae |
| 679 | gl_14602140 | Aeropyrum pernix |
| 680 | gl_21220517 | Streptomyces coelicolor A3(2) |
| 681 | gl_29376065 | Enterococcus faecalis V583 |
| 682 | MRT4565_11213P.3 | Triticum aestivum |
| 683 | gl_15642911 | Thermotoga maritima |
| 684 | gl_17546700 | Ralstonia solanacearum |
| 685 | gl_28900678 | Vibrio parahaemolyticus RIMD 2210633 |
| 686 | MRT4565_43124P.2 | Triticum aestivum |
| 687 | gl_24940270 | Wigandia caracasana |
| 688 | gl_14585885 | Pisum sativum |
| 689 | gl_15674910 | Streptococcus pyogenes M1 GAS |
| 690 | gl_4063538 | Carica papaya |
| 691 | gl_7708574 | Rhamnus cathartica |
| 692 | gl_15892991 | Rickettsia conorii |
| 693 | gl_4995854 | Thymelaea hirsuta |
| 694 | gl_11558184 | Lycopersicon esculentum |
| 695 | gl_14718147 | Neurada procumbens |
| 696 | gl_28566182 | Hordeum vulgare subsp. vulgare |
| 697 | gl_23061852 | Pseudomonas fluorescens PfO-1 |
| 698 | MRT3847_47036P.3 | Glycine max |
| 699 | gl_8452756 | Swietenia macrophylla |
| 700 | gl_7708464 | Koelreuteria paniculata |
| 701 | gl_20514385 | Strasburgeria robusta |
| 702 | MRT3847_56279P.2 | Glycine max |
| 703 | gl_28379494 | Lactobacillus plantarum WCFS1 |
| 704 | gl_4995057 | Abroma augustum |
| 705 | gl_19554226 | Corynebacterium glutamicum ATCC 13032 |
| 706 | gl_7708147 | Androsace spinulifera |
| 707 | gl_12004145 | Maesa tenera |
| 708 | gl_23056436 | Geobacter metallireducens |
| 709 | gl_5764615 | Zymomonas mobilis subsp. pomaceae |
| 710 | gl_33240025 | Prochlorococcus marinus subsp. marinus |
| | | str. CCMP1375 |
| 711 | gl_20467387 | Ephedra equisetina |
| 712 | gl_6467934 | Potamogeton berchtoldii |
| 713 | gl_20136045 | Shigella dysenteriae |
| 714 | gl_24967137 | Lycopersicon esculentum |
| 715 | gl_21684881 | Coleochloa abyssinica |
| 716 | gl_80953 | Methanothermococcus thermolithotrophicus |
| 717 | gl_29829367 | Streptomyces avermitilis MA-4680 |
| 718 | gl_28188325 | Coleochaete scutata |
| 719 | gl_23123457 | Prochlorococcus marinus subsp. pastoris |
| | | str. CCMP1378 |
| 720 | gl_3915890 | Cyanidium caldarium |
| 721 | gl_5231184 | Streptococcus pneumoniae |
| 722 | gl_15611532 | Helicobacter pylori J99 |
| 723 | gl_14041687 | Juglans regla |
| 724 | MRT4530_35849P.2 | Oryza sativa |
| 725 | gl_19881629 | Oryza sativa (japonica cultivar-group) |
| 726 | MRT4565_14599P.3 | Triticum aestivum |
| 727 | gl_7447118 | Pisum sativum |
| 728 | MRT4565_14138P.3 | Triticum aestivum |
| 729 | gl_24379618 | Streptococcus mutans UA159 |
| 730 | gl_30689162 | Arabidopsis thaliana |
| 731 | gl_19033067 | Coleochaete irregularis |
| 732 | gl_3334120 | Triticum aestivum |
| 733 | gl_12045070 | Mycoplasma genitalium |
| 734 | gl_14717948 | Balanops vieillardi |
| 735 | MRT3847_52567P.3 | Glycine max |
| 736 | gl_13183137 | Psidium guajava |
| 737 | gl_7708444 | Ilex crenata |
| 738 | gl_5830465 | Medicago sativa |
| 739 | gl_6688901 | Olea europaea |
| 740 | gl_15235430 | Arabidopsis thaliana |
| 741 | gl_4995850 | Triplochiton zambesiacus |
| 742 | gl_30352098 | Adiantum capillus-veneris |
| 743 | gl_23503623 | Carteria radiosa |
| 744 | MRT4565_59504P.2 | Triticum aestivum |
| 745 | gl_28211966 | Clostridium tetani E88 |
| 746 | gl_17231725 | Nostoc sp. PCC 7120 |
| 747 | MRT3847_55865P.2 | Glycine max |
| 748 | gl_12004157 | Primula sieboldii |
| 749 | gl_27364101 | Vibrio vulnificus CMCP6 |
| 750 | gl_14717990 | Carya glabra |
| 751 | gl_6094551 | Arabidopsis thaliana |
| 752 | gl_7447979 | Medicago sativa |
| 753 | gl_14330338 | Schedonorus pratensis |
| 754 | gl_27528492 | Saccharomyces pastorianus |
| 755 | gl_30683170 | Arabidopsis thaliana |
| 756 | gl_7708145 | Anagallis tenella |
| 757 | gl_32035049 | Actinobacillus pleuropneumoniae serovar 1 str. 4074 |
| 758 | gl_19705084 | Fusobacterium nucleatum subsp. nucleatum |
| | | ATCC 25586 |
| 759 | gl_20260650 | Arabidopsis thaliana |
| 760 | gl_688420 | Nicotiana glauca x Nicotiana langsdorffii |
| 761 | gl_4995153 | Fremontodendron californicum x Fremontodendron |
| | | mexicanum |
| 762 | gl_22532109 | Pseudomonas syringae |
| 763 | MRT4565_131929P.1 | Triticum aestivum |
| 764 | gl_14718056 | Flagellaria indica |
| 765 | gl_21633343 | Iseia luxurians |
| 766 | gl_7708300 | Escallonia sp. ‘Chase 2499 K’ |
| 767 | gl_113786 | Hordeum vulgare |
| 768 | gl_23059426 | Pseudomonas fluorescens PfO-1 |
| 769 | gl_17548614 | Ralstonia solanacearum |
| 770 | gl_11499192 | Archaeoglobus fulgldus DSM 4304 |
| 771 | gl_729237 | Ralstonia eutropha |
| 772 | gl_21070389 | Pennisetum glaucum |
| 773 | gl_6984122 | Capsicum annuum |
| 774 | gl_7688417 | Verbena scabrido-glandulosa |
| 775 | gl_28895034 | Streptococcus pyogenes SSI-1 |
| 776 | gl_7708538 | Phytolacca dioica |
| 777 | gl_23194453 | Gossypium hirsutum |
| 778 | MRT3847_258276P.2 | Glycine max |
| 779 | gl_29420867 | Saccharomyces pastorianus |
| 780 | gl_21633415 | Jacquemontia blanchetii |
| 781 | gl_28262023 | Rickettsia sibirica |
| 782 | gl_22969349 | Rhodospirillum rubrum |
| 783 | gl_32034452 | Actinobacillus pleuropneumoniae serovar |
| | | 1 str. 4074 |
| 784 | gl_20149298 | Malus x domestica |
| 785 | gl_8489192 | Lactococcus lactis subsp. lactis bv. |
| | | diacetylactis |
| 786 | gl_6687481 | Euthystachys abbreviata |
| 787 | gl_3850948 | Austromuellera trinervia |
| 788 | gl_114528 | Sulfolobus acidocaldarius |
| 789 | gl_8980813 | Castanea sativa |
| 790 | gl_16079874 | Bacillus subtilis subsp. subtilis str. 168 |
| 791 | gl_28194508 | Lotus japonicus |
| 792 | gl_28210705 | Clostridium tetani E88 |
| 793 | gl_6706178 | Gerbera jamesonii |
| 794 | gl_16943658 | Anemarrhena asphodeloides |
| 795 | gl_21326117 | Sorghum bicolor |
| 796 | gl_15216028 | Vicia faba var. minor |
| 797 | MRT4565_89954P.2 | Triticum aestivum |
| 798 | gl_5758921 | Zinglber gramineum |
| 799 | MRT4565_118733P.1 | Triticum aestivum |
| 800 | gl_27886806 | Fusobacterium nucleatum subsp. |
| | | vincentii ATCC 49256 |
| 801 | gl_3913031 | Medicago sativa |
| 802 | gl_18414404 | Arabidopsis thaliana |
| 803 | MRT4565_134443P.1 | Triticum aestivum |
| 804 | gl_4103757 | Corylus avellana |
| 805 | gl_21228923 | Methanosarcina mazei Goe1 |
| 806 | gl_30688675 | Arabidopsis thaliana |
| 807 | gl_32765543 | Hevea brasiliensis |
| 808 | gl_4063536 | Capparis spinosa |
| 809 | gl_7708313 | Geum sp. ‘Chase 2507 K’ |
| 810 | gl_29420847 | Saccharomyces cerevisiae |
| 811 | gl_1072369 | Enterococcus hirae |
| 812 | gl_23131072 | Prochlorococcus marinus str. MIT 9313 |
| 813 | gl_7708630 | Salacia pallescens |
| 814 | gl_5002358 | Azospirillum brasilense |
| 815 | gl_6017840 | Schisandra chinensis |
| 816 | gl_7861547 | Hydrogenophilus thermoluteolus |
| 817 | gl_23336808 | Bifidobacterium longum DJ010A |
| 818 | gl_1805530 | Escherichia coli |
| 819 | gl_3850914 | Stirlingla latifolia |
| 820 | gl_17231176 | Nostoc sp. PCC 7120 |
| 821 | gl_6687550 | Eremosyne pectinata |
| 822 | gl_21220814 | Streptomyces coelicolor A3(2) |
| 823 | gl_19112800 | Schizosaccharomyces pombe |
| 824 | gl_24374549 | Shewanella oneidensis MR-1 |
| 825 | gl_27467848 | Staphylococcus epidermidis ATCC 12228 |
| 826 | MRT4530_46208P.1 | Oryza sativa |
| 827 | gl_3913034 | Vigna unguiculata |
| 828 | gl_16943741 | Kniphofia uvaria |
| 829 | gl_6687627 | Gustavia superba |
| 830 | MRT4530_21634P.2 | Oryza sativa |
| 831 | gl_19578317 | Arabidopsis thaliana |
| 832 | gl_11034787 | Cabomba caroliniana |
| 833 | gl_18312083 | Pyrobaculum aerophilum str. IM2 |
| 834 | gl_6942107 | Brucella melitensis biovar Abortus |
| 835 | MRT3847_233420P.2 | Glycine max |
| 836 | gl_20136043 | Shigella dysenteriae |
| 837 | gl_24967135 | Lycopersicon esculentum |
| 838 | gl_17224761 | Tacca plantaglnea |
| 839 | gl_16273337 | Haemophilus influenzae Rd |
| 840 | gl_4995181 | Helicteres baruensis |
| 841 | gl_1526982 | Salmonella typhimurium |
| 842 | gl_26247926 | Escherichia coli CFT073 |
| 843 | gl_14906664 | Sorghum bicolor |
| 844 | MRT4565_64073P.2 | Triticum aestivum |
| 845 | gl_4206584 | Chorilaena quercifolia |
| 846 | gl_23099626 | Oceanobacillus iheyensis HTE831 |
| 847 | gl_6691650 | Moritella marina |
| 848 | gl_15791646 | Campylobacter jejuni subsp. jejuni NCTC 11168 |
| 849 | gl_24940246 | Nemophila insignis |
| 850 | gl_11908164 | Swietenia macrophylla |
| 851 | gl_29150650 | Oryza sativa (indica cultivar-group) |
| 852 | gl_22758323 | Oryza sativa (japonica cultivar-group) |
| 853 | MRT4565_42533P.3 | Triticum aestivum |
| 854 | gl_7708321 | Guaiacum sanctum |
| 855 | gl_7708676 | Thunbergla coccinea |
| 856 | gl_7708466 | Krameria ixine |
| 857 | MRT4565_103551P.1 | Triticum aestivum |
| 858 | gl_27377698 | Bradyrhizobium japonicum USDA 110 |
| 859 | gl_30267062 | Ipomoea tabascana |
| 860 | gl_19743774 | Gossypium hirsutum |
| 861 | gl_27657747 | Helianthus annuus |
| 862 | gl_7687980 | Gyrocarpus americanus |
| 863 | gl_7578495 | Quercus rubra |
| 864 | gl_6599047 | Chlamydia trachomatis |
| 865 | gl_732262 | Yersinia pseudotuberculosis |
| 866 | gl_19115131 | Schizosaccharomyces pombe |
| 867 | gl_21633375 | Bonamia spectabilis |
| 868 | gl_7446520 | Cucumis sativus |
| 869 | gl_14717946 | Asteropeia micraster |
| 870 | gl_4206759 | Cryptococcus neoformans var. grubii |
| 871 | gl_17232303 | Nostoc sp. PCC 7120 |
| 872 | gl_21328719 | uncultured proteobacterium |
| 873 | gl_15618755 | Chlamydophila pneumoniae CWL029 |
| 874 | gl_282382 | Geobacillus stearothermophilus |
| 875 | gl_2129972 | Petunia x hybrida |
| 876 | gl_6225171 | Synechococcus sp. PCC 7942 |
| 877 | gl_7688029 | Nymphaea odorata |
| 878 | gl_16943662 | Aspidistra elatior |
| 879 | gl_461978 | Lycopersicon esculentum |
| 880 | MRT4565_40318P.2 | Triticum aestivum |
| 881 | gl_6319704 | Saccharomyces cerevisiae |
| 882 | MRT4565_9194P.2 | Triticum aestivum |
| 883 | MRT3847_90337P.3 | Glycine max |
| 884 | gl_2493122 | Brassica napus |
| 885 | gl_27468291 | Staphylococcus epidermidis ATCC 12228 |
| 886 | gl_19033069 | Coleochaete sieminskiana |
| 887 | MRT4530_91499P.1 | Oryza sativa |
| 888 | gl_7708335 | Humulus lupulus |
| 889 | gl_21402641 | Bacillus anthracis str. A2012 |
| 890 | gl_28563989 | Saccharomyces bayanus |
| 891 | gl_27904791 | Buchnera aphidicola str. Bp (Baizongla pistaciae) |
| 892 | gl_24935324 | Medicago truncatula |
| 893 | gl_5921507 | Mortierella alpina |
| 894 | gl_7708315 | Globularia salicina |
| 895 | gl_114520 | Methanosarcina barkeri |
| 896 | gl_15226178 | Arabidopsis thaliana |
| 897 | gl_1707370 | Arabidopsis thaliana |
| 898 | gl_22997796 | Xylella fastidiosa Ann-1 |
| 899 | gl_16273468 | Haemophilus influenzae Rd |
| 900 | gl_151617 | Pseudomonas aeruglnosa |
| 901 | gl_21219634 | Streptomyces coelicolor A3(2) |
| 902 | MRT4565_76776P.2 | Triticum aestivum |
| 903 | gl_23118917 | Desulfitobacterium hafniense |
| 904 | gl_32130302 | Bacillus subtilis var. natto |
| 905 | MRT3847_52222P.3 | Glycine max |
| 906 | gl_12004159 | Primula veitchiana |
| 907 | gl_6688708 | Mentzelia lindleyi |
| 908 | gl_23021744 | Clostridium thermocellum ATCC 27405 |
| 909 | gl_136258 | Haloferax volcanii |
| 910 | gl_7687960 | Austrobaileya scandens |
| 911 | MRT3847_39339P.3 | Glycine max |
| 912 | gl_32489847 | Oryza sativa (japonica cultivar-group) |
| 913 | gl_30693784 | Arabidopsis thaliana |
| 914 | gl_7381060 | Populus tremula x Populus tremuloides |
| 915 | gl_19033097 | Chlorokybus atmophyticus |
| 916 | gl_27528502 | Saccharomyces kluyveri |
| 917 | MRT4530_27056P.1 | Oryza sativa |
| 918 | MRT3847_30014P.3 | Glycine max |
| 919 | gl_4063568 | Pavonia multiflora |
| 920 | gl_30724884 | Microbispora rosea subsp. aerata |
| 921 | gl_23099005 | Oceanobacillus iheyensis HTE831 |
| 922 | gl_19705056 | Fusobacterium nucleatum subsp. |
| | | nucleatum ATCC 25586 |
| 923 | MRT4565_101762P.1 | Triticum aestivum |
| 924 | MRT3847_225429P.3 | Glycine max |
| 925 | gl_7708542 | Pittosporum fairchildii |
| 926 | gl_7708329 | Helwingla japonica |
| 927 | gl_79917 | Staphylococcus aureus |
| 928 | gl_23016131 | Magnetospirillum magnetotacticum |
| 929 | gl_19352035 | Oryza sativa |
| 930 | MRT4530_60814P.1 | Oryza sativa |
| 931 | gl_4995844 | Sarcolaena sp. Chase 903 |
| 932 | gl_30685252 | Arabidopsis thaliana |
| 933 | gl_7434424 | Oryza longlstaminata |
| 934 | gl_13161415 | Oryza sativa (japonica cultivar-group) |
| 935 | MRT4530_77791P.2 | Oryza sativa |
| 936 | gl_32039540 | Pseudomonas aeruglnosa UCBPP-PA14 |
| 937 | gl_22094585 | Populus tomentosa |
| 938 | gl_6601482 | Allium cepa |
| 939 | gl_136264 | Pseudomonas putida |
| 940 | MRT4565_66175P.2 | Triticum aestivum |
| 941 | gl_27528480 | Saccharomyces unisporus |
| 942 | gl_15669227 | Methanocaldococcus jannaschii |
| 943 | gl_15225218 | Arabidopsis thaliana |
| 944 | gl_18406070 | Arabidopsis thaliana |
| 945 | gl_4837612 | Antirrhinum majus |
| 946 | gl_4995063 | Apeiba tibourbou |
| 947 | gl_16123318 | Yersinia pestis CO92 |
| 948 | gl_31126749 | Oryza sativa (japonica cultivar-group) |
| 949 | gl_7708556 | Polygonum sachalinense |
| 950 | gl_27529081 | Zygosaccharomyces rouxii |
| 951 | gl_20136075 | Shigella sonnei |
| 952 | gl_23124896 | Nostoc punctiforme |
| 953 | gl_29828741 | Streptomyces avermitilis MA-4680 |
| 954 | gl_6688494 | Irvingbaileya sp. Plunkett 1510 |
| 955 | gl_11466709 | Marchantia polymorpha |
| 956 | gl_33113492 | Pringlea antiscorbutica |
| 957 | gl_27529077 | Zygosaccharomyces bailii |
| 958 | gl_15224925 | Arabidopsis thaliana |
| 959 | gl_553048 | Daucus carota |
| 960 | gl_29375007 | Enterococcus faecalis V583 |
| 961 | gl_27887626 | Fusobacterium nucleatum subsp. |
| | | vincentii ATCC 49256 |
| 962 | gl_30421165 | Hordeum vulgare |
| 963 | gl_17546431 | Ralstonia solanacearum |
| 964 | gl_15810897 | Antirrhinum majus subsp. cirrhigerum |
| 965 | gl_15223786 | Arabidopsis thaliana |
| 966 | gl_23465333 | Bifidobacterium longum NCC2705 |
| 967 | MRT4565_26905P.2 | Triticum aestivum |
| 968 | MRT4565_47460P.3 | Triticum aestivum |
| 969 | gl_3779258 | Hordeum vulgare subsp. vulgare |
| 970 | gl_23474551 | Desulfovibrio desulfuricans G20 |
| 971 | gl_7687976 | Eupomatia bennettii |
| 972 | gl_15237539 | Arabidopsis thaliana |
| 973 | gl_16272655 | Haemophilus influenzae Rd |
| 974 | gl_29832720 | Streptomyces avermitilis MA-4680 |
| 975 | gl_15425564 | Crispiloba disperma |
| 976 | gl_11267101 | Methanosarcina mazei |
| 977 | gl_23469383 | Pseudomonas syringae pv. syringae B728a |
| 978 | gl_23104278 | Azotobacter vinelandii |
| 979 | gl_29420853 | Candida glabrata |
| 980 | gl_15828711 | Mycoplasma pulmonis |
| 981 | gl_14718242 | Tapiscia sinensis |
| 982 | gl_7708578 | Rinorea bengalensis |
| 983 | gl_4995757 | Pachira aquatica |
| 984 | gl_14329816 | Atropa belladonna |
| 985 | gl_6688492 | Justicia americana |
| 986 | gl_4995705 | Microcos latistipulata |
| 987 | MRT4565_21523P.3 | Triticum aestivum |
| 988 | gl_23336272 | Bifidobacterium longum DJO10A |
| 989 | gl_20467383 | Ephedra sp. CR08 |
| 990 | gl_7708215 | Corynocarpus laevigatus |
| 991 | gl_23119424 | Desulfitobacterium hafniense |
| 992 | gl_20136041 | Shigella dysenteriae |
| 993 | MRT4565_123153P.1 | Triticum aestivum |
| 994 | MRT3847_243747P.2 | Glycine max |
| 995 | gl_6706286 | Phlox longlfolia |
| 996 | gl_16804835 | Listeria monocytogenes EGD-e |
| 997 | MRT4530_100513P.2 | Oryza sativa |
| 998 | gl_31126747 | Oryza sativa (japonica cultivar-group) |
| 999 | gl_24215258 | Leptospira interrogans serovar lai str. 56601 |
| 1000 | gl_4180 | Saccharomyces cerevisiae |
| 1001 | gl_30385250 | x Citrofortunella mitis |
| 1002 | gl_21226817 | Methanosarcina mazei Goe1 |
| 1003 | MRT4530_54698P.1 | Oryza sativa |
| 1004 | MRT3847_25290P.2 | Glycine max |
| 1005 | MRT4565_104502P.1 | Triticum aestivum |
| 1006 | gl_24940166 | Cerinthe major |
| 1007 | gl_15226967 | Arabidopsis thaliana |
| 1008 | gl_23475994 | Desulfovibrio desulfuricans G20 |
| 1009 | gl_12585490 | Citrus unshiu |
| 1010 | gl_30267060 | Ipomoea setosa |
| 1011 | MRT4530_57126P.1 | Oryza sativa |
| 1012 | MRT3847_52223P.3 | Glycine max |
| 1013 | gl_27657745 | Helianthus annuus |
| 1014 | gl_32400328 | Asperglllus oryzae |
| 1015 | gl_20161442 | Oryza sativa (japonica cultivar-group) |
| 1016 | gl_8388947 | Eriostemon brevifolius |
| 1017 | gl_15897407 | Sulfolobus solfataricus |
| 1018 | gl_30022560 | Bacillus cereus ATCC 14579 |
| 1019 | gl_7708286 | Eucryphia milliganii |
| 1020 | gl_27262488 | Heliobacillus mobilis |
| 1021 | gl_9955371 | Escherichia coli |
| 1022 | gl_6692624 | Allium cepa |
| 1023 | MRT4530_101175P.1 | Oryza sativa |
| 1024 | gl_12004161 | Samolus repens |
| 1025 | gl_94733 | Thermus aquaticus |
| 1026 | gl_3913005 | Panax glnseng |
| 1027 | gl_1169445 | Pisum sativum |
| 1028 | MRT3847_253859P.2 | Glycine max |
| 1029 | gl_18657017 | Oryza sativa |
| 1030 | gl_6320442 | Saccharomyces cerevisiae |
| 1031 | gl_15236190 | Arabidopsis thaliana |
| 1032 | gl_15618012 | Chlamydophila pneumoniae CWL029 |
| 1033 | gl_29420833 | Saccharomyces cerevisiae |
| 1034 | MRT4565_6744P.2 | Triticum aestivum |
| 1035 | gl_14718140 | Moringa oleifera |
| 1036 | gl_15604188 | Rickettsia prowazekii |
| 1037 | gl_12004149 | Omphalogramma delavayi |
| 1038 | gl_775181 | Escherichia coli |
| 1039 | gl_217940 | Ipomoea batatas |
| 1040 | gl_14718085 | Idesia polycarpa |
| 1041 | MRT4530_103357P.1 | Oryza sativa |
| 1042 | gl_27125515 | Mesembryanthemum crystallinum |
| 1043 | gl_25011425 | Streptococcus agalactiae NEM316 |
| 1044 | gl_6456467 | Taraxacum officinale |
| 1045 | gl_7573596 | Populus nigra |
| 1046 | MRT4530_57276P.1 | Oryza sativa |
| 1047 | gl_12004131 | Anagallis arvensis |
| 1048 | gl_15897777 | Sulfolobus solfataricus |
| 1049 | gl_3850978 | Embothrium coccineum |
| 1050 | gl_28563987 | Saccharomyces bayanus |
| 1051 | gl_15901412 | Streptococcus pneumoniae TIGR4 |
| 1052 | gl_21633463 | Montinia caryophyllacea |
| 1053 | gl_20805979 | Chlamydia trachomatis |
| 1054 | gl_7688411 | Utricularia biflora |
| 1055 | gl_27468267 | Staphylococcus epidermidis ATCC 12228 |
| 1056 | gl_25345298 | Arabidopsis thaliana |
| 1057 | gl_16763830 | Salmonella typhimurium LT2 |
| 1058 | gl_28211923 | Clostridium tetani E88 |
| 1059 | gl_17065024 | Arabidopsis thaliana |
| 1060 | gl_22959339 | Rhodobacter sphaeroides |
| 1061 | gl_6759507 | Elaeis guineensis |
| 1062 | gl_28188339 | Coleochaete divergens |
| 1063 | gl_13476995 | Mesorhizobium loti |
| 1064 | gl_7708652 | Spathiphyllum wallisii |
| 1065 | gl_15642010 | Vibrio cholerae |
| 1066 | gl_30695267 | Arabidopsis thaliana |
| 1067 | MRT3847_29671P.3 | Glycine max |
| 1068 | gl_4995796 | Sterculia apetala |
| 1069 | gl_27366266 | Vibrio vulnificus CMCP6 |
| 1070 | gl_1169648 | Rhodococcus fascians |
| 1071 | gl_16122431 | Yersinia pestis CO92 |
| 1072 | gl_25289327 | Arabidopsis thaliana |
| 1073 | gl_4995759 | Neurada procumbens |
| 1074 | gl_30696140 | Arabidopsis thaliana |
| 1075 | gl_7708327 | Heisteria parvifolia |
| 1076 | gl_14289139 | Bacillus sphaericus |
| 1077 | gl_15966192 | Sinorhizobium meliloti |
| 1078 | MRT3847_268909P.1 | Glycine max |
| 1079 | gl_4063566 | Simarouba glauca |
| 1080 | MRT3847_162726P.3 | Glycine max |
| 1081 | gl_28973727 | Arabidopsis thaliana |
| 1082 | gl_16126292 | Caulobacter crescentus CB15 |
| 1083 | gl_602900 | Silene latifolia |
| 1084 | gl_21633411 | Jacquemontia tamnifolia |
| 1085 | gl_5019431 | Gnetum gnemon |
| 1086 | gl_25307920 | Picea abies |
| 1087 | MRT4530_7968P.2 | Oryza sativa |
| 1088 | gl_4206608 | Pleiospermium alatum |
| 1089 | gl_25486627 | Picea mariana |
| 1090 | gl_23122427 | Prochlorococcus marinus subsp. pastoris |
| | | str. CCMP1378 |
| 1091 | MRT4530_85948P.1 | Oryza sativa |
| 1092 | gl_16078679 | Bacillus subtilis subsp. subtilis str. 168 |
| 1093 | gl_15602442 | Pasteurella multocida |
| 1094 | gl_3850944 | Orites lancifolia |
| 1095 | gl_16126335 | Caulobacter crescentus CB15 |
| 1096 | gl_21684883 | Ecdeiocolea monostachya |
| 1097 | gl_23132758 | Synechococcus sp. WH 8102 |
| 1098 | gl_80601 | Corynebacterium glutamicum |
| 1099 | gl_21954719 | Mesotaenium caldariorum |
| 1100 | gl_21536895 | Arabidopsis thaliana |
| 1101 | gl_7442735 | Ricinus communis |
| 1102 | gl_29539348 | Cyanidioschyzon merolae |
| 1103 | gl_2497543 | Nicotiana tabacum |
| 1104 | gl_16800673 | Listeria innocua |
| 1105 | MRT3847_224215P.2 | Glycine max |
| 1106 | gl_23106149 | Azotobacter vinelandii |
| 1107 | gl_125606 | Solanum tuberosum |
| 1108 | gl_15605029 | Chlamydia trachomatis |
| 1109 | gl_7676165 | Methanothermobacter thermautotrophicus |
| 1110 | gl_20136073 | Shigella sonnei |
| 1111 | gl_23135856 | Cytophaga hutchinsonii |
| 1112 | gl_22986693 | Burkholderia fungorum |
| 1113 | gl_11279328 | Pisum sativum |
| 1114 | gl_4586799 | Nicotiana tabacum |
| 1115 | gl_32476350 | Pirellula sp. |
| 1116 | gl_21742732 | Oryza sativa (japonica cultivar-group) |
| 1117 | MRT4565_78273P.2 | Triticum aestivum |
| 1118 | gl_29348250 | Bacteroides thetaiotaomicron VPI-5482 |
| 1119 | gl_30421168 | Hordeum vulgare |
| 1120 | gl_2506211 | Vigna radiata var. radiata |
| 1121 | gl_5830467 | Medicago sativa |
| 1122 | MRT4565_118736P.1 | Triticum aestivum |
| 1123 | gl_8517661 | Silene nutans |
| 1124 | gl_1310978 | Escherichia coli |
| 1125 | gl_21633441 | Dinetus truncatus |
| 1126 | gl_21684927 | Streptochaeta spicata |
| 1127 | gl_15963782 | Sinorhizobium meliloti |
| 1128 | gl_15982240 | Nicotiana attenuata |
| 1129 | MRT4530_98210P.1 | Oryza sativa |
| 1130 | gl_23123201 | Prochlorococcus marinus subsp. pastoris |
| | | str. CCMP1378 |
| 1131 | gl_15617074 | Buchnera aphidicola str. APS |
| | | (Acyrthosiphon pisum) |
| 1132 | gl_15609594 | Mycobacterium tuberculosis H37Rv |
| 1133 | gl_15806971 | Deinococcus radiodurans |
| 1134 | gl_18404228 | Arabidopsis thaliana |
| 1135 | gl_17224755 | Tacca leontopetaloides |
| 1136 | gl_23134144 | Synechococcus sp. WH 8102 |
| 1137 | gl_27528494 | Saccharomyces kudriavzevii |
| 1138 | gl_14718240 | Tamarix pentandra |
| 1139 | gl_22536365 | Streptococcus agalactiae 2603V/R |
| 1140 | gl_17988302 | Brucella melitensis 16M |
| 1141 | gl_20805995 | Chlamydia trachomatis |
| 1142 | gl_21673243 | Chlorobium tepidum TLS |
| 1143 | gl_28897692 | Vibrio parahaemolyticus RIMD 2210633 |
| 1144 | gl_24940188 | Hydrophyllum canadense |
| 1145 | gl_20467381 | Ephedra fragllis |
| 1146 | gl_22970242 | Chloroflexus aurantiacus |
| 1147 | MRT3847_257209P.2 | Glycine max |
| 1148 | gl_7488272 | Arabidopsis thaliana |
| 1149 | gl_22993311 | Enterococcus faecium |
| 1150 | gl_6017824 | Rheum rhaponticum |
| 1151 | gl_13676299 | Glycine max |
| 1152 | gl_15595759 | Pseudomonas aeruglnosa PAO1 |
| 1153 | gl_4033710 | Picea mariana |
| 1154 | gl_7708254 | Celastrus orbiculatus |
| 1155 | gl_15597263 | Pseudomonas aeruglnosa PAO1 |
| 1156 | gl_21672725 | Buchnera aphidicola str. Sg (Schizaphis graminum) |
| 1157 | gl_4063562 | Ruta graveolens |
| 1158 | gl_15802088 | Escherichia coli 0157:H7 EDL933 |
| 1159 | gl_7674396 | Thermococcus kodakaraensis |
| 1160 | gl_32476155 | Pirellula sp. |
| 1161 | MRT3847_32267P.3 | Glycine max |
| 1162 | gl_137460 | Daucus carota |
| 1163 | gl_23029594 | Microbulbifer degradans 2-40 |
| 1164 | gl_23126009 | Nostoc punctiforme |
| 1165 | gl_16078805 | Bacillus subtilis subsp. subtilis str. 168 |
| 1166 | gl_29420869 | Saccharomyces pastorianus |
| 1167 | gl_14718009 | Cleome hassleriana |
| 1168 | gl_21684907 | Mayaca fluviatilis |
| 1169 | gl_16803308 | Listeria monocytogenes EGD-e |
| 1170 | MRT3847_50682P.1 | Glycine max |
| 1171 | gl_21593559 | Arabidopsis thaliana |
| 1172 | gl_21633371 | Cressa truxillensis |
| 1173 | gl_22967579 | Rhodospirillum rubrum |
| 1174 | MRT4565_57148P.3 | Triticum aestivum |
| 1175 | gl_7488446 | Brassica napus |
| 1176 | gl_23002842 | Lactobacillus gasseri |
| 1177 | gl_27528476 | Torulaspora globosa |
| 1178 | gl_15641923 | Vibrio cholerae |
| 1179 | gl_17986575 | Brucella melitensis 16M |
| 1180 | gl_15600873 | Vibrio cholerae |
| 1181 | gl_15606540 | Aquifex aeolicus VF5 |
| 1182 | gl_6687483 | Exacum affine |
| 1183 | gl_32404216 | Neurospora crassa |
| 1184 | gl_15893809 | Clostridium acetobutylicum |
| 1185 | gl_18077601 | Paracryphia alticola |
| 1186 | gl_24298775 | Thermotoga neapolitana |
| 1187 | MRT3847_33136P.3 | Glycine max |
| 1188 | gl_11465694 | Porphyra purpurea |
| 1189 | gl_1346399 | Lactobacillus delbrueckii subsp. bulgaricus |
| 1190 | gl_28870880 | Pseudomonas syringae pv. tomato str. DC3000 |
| 1191 | gl_23130789 | Prochlorococcus marinus str. MIT 9313 |
| 1192 | gl_15837790 | Xylella fastidiosa 9a5c |
| 1193 | gl_32410899 | Neurospora crassa |
| 1194 | gl_21283347 | Staphylococcus aureus subsp. aureus MW2 |
| 1195 | gl_21553710 | Arabidopsis thaliana |
| 1196 | gl_5001601 | Schumacheria sp. SH1999 |
| 1197 | gl_30693084 | Arabidopsis thaliana |
| 1198 | gl_4096982 | Rosa hybrid cultivar |
| 1199 | gl_21633359 | Cladostigma hildebrandtioides |
| 1200 | MRT3847_198776P.3 | Glycine max |
| 1201 | gl_1364102 | Rumex acetosa |
| 1202 | MRT3847_249579P.2 | Glycine max |
| 1203 | gl_15596999 | Pseudomonas aeruglnosa PAO1 |
| 1204 | MRT4565_141501P.1 | Triticum aestivum |
| 1205 | gl_3850976 | Alloxylon wickhamii |
| 1206 | gl_28563985 | Saccharomyces bayanus |
| 1207 | gl_23028929 | Microbulbifer degradans 2-40 |
| 1208 | gl_33240373 | Prochlorococcus marinus subsp. |
| | | marinus str. CCMP1375 |
| 1209 | MRT4530_110805P.1 | Oryza sativa |
| 1210 | gl_22537102 | Streptococcus agalactiae 2603V/R |
| 1211 | gl_3913006 | Petunia x hybrida |
| 1212 | gl_2120372 | Thermotoga maritima |
| 1213 | gl_16079970 | Bacillus subtilis subsp. subtilis str. 168 |
| 1214 | gl_15679655 | Methanothermobacter thermautotrophicus |
| | | str. Delta H |
| 1215 | MRT3847_40554P.3 | Glycine max |
| 1216 | gl_29420849 | Saccharomyces cerevisiae |
| 1217 | gl_28188337 | Coleochaete nitellarum |
| 1218 | MRT4565_86330P.2 | Triticum aestivum |
| 1219 | MRT4565_49252P.2 | Triticum aestivum |
| 1220 | gl_4322325 | Nepenthes alata |
| 1221 | gl_7428175 | Arabidopsis thaliana |
| 1222 | MRT3847_218209P.1 | Glycine max |
| 1223 | gl_7706848 | Amaranthus hypochondriacus |
| 1224 | gl_12004133 | Androsace sp. Anderberg s.n. |
| 1225 | gl_1808694 | Sporobolus stapfianus |
| 1226 | gl_13447449 | Brassica napus |
| 1227 | gl_18410104 | Arabidopsis thaliana |
| 1228 | MRT4530_71260P.2 | Oryza sativa |
| 1229 | gl_30022674 | Bacillus cereus ATCC 14579 |
| 1230 | gl_15827775 | Mycobacterium leprae |
| 1231 | gl_19033085 | Zygnema peliosporum |
| 1232 | gl_4063564 | Schinus molle |
| 1233 | gl_464911 | Pseudomonas syringae pv. syringae |
| 1234 | MRT4565_58034P.2 | Triticum aestivum |
| 1235 | gl_5001597 | Didymeles perrieri |
| 1236 | gl_8096650 | Oryza sativa (japonica cultivar-group) |
| 1237 | gl_20805068 | Oryza sativa (japonica cultivar-group) |
| 1238 | gl_7708143 | Alanglum sp. Chase 2541 |
| 1239 | MRT3847_271867P.1 | Glycine max |
| 1240 | gl_20094453 | Methanopyrus kandleri AV19 |
| 1241 | gl_3023341 | Equisetum arvense |
| 1242 | gl_4206606 | Glycosmis pentaphylla |
| 1243 | gl_7446714 | Capsicum annuum |
| 1244 | gl_22125938 | Yersinia pestis KIM |
| 1245 | gl_18310620 | Clostridium perfringens str. 13 |
| 1246 | gl_1336803 | Mesembryanthemum crystallinum |
| 1247 | gl_7708668 | Symplocos costata |
| 1248 | gl_20136029 | Shigella flexneri |
| 1249 | gl_3850942 | Neorites kevediana |
| 1250 | gl_4995848 | Thomasia solanacea |
| 1251 | gl_1667582 | Arabidopsis thaliana |
| 1252 | gl_11527563 | Hordeum vulgare subsp. vulgare |
| 1253 | gl_68331 | Klebsiella pneumoniae |
| 1254 | MRT4530_121232P.2 | Oryza sativa |
| 1255 | gl_22748323 | Oryza sativa (japonica cultivar-group) |
| 1256 | gl_21956014 | Vitreochlamys aulata |
| 1257 | MRT4565_27586P.3 | Triticum aestivum |
| 1258 | MRT4530_100337P.1 | Oryza sativa |
| 1259 | gl_15240418 | Arabidopsis thaliana |
| 1260 | MRT4530_114765P.2 | Oryza sativa |
| 1261 | gl_16760530 | Salmonella enterica subsp. enterica serovar Typhi |
| 1262 | gl_15645143 | Helicobacter pylori 26695 |
| 1263 | gl_29833210 | Streptomyces avermitilis MA-4680 |
| 1264 | gl_15529115 | Sorghum bicolor |
| 1265 | gl_4995095 | Chorisia speciosa |
| 1266 | MRT4565_71673P.1 | Triticum aestivum |
| 1267 | gl_6729696 | Hordeum vulgare |
| 1268 | gl_15896405 | Clostridium acetobutylicum |
| 1269 | gl_15082058 | Solanum tuberosum |
| 1270 | gl_4995649 | Keraudrenia hermanniifolia |
| 1271 | MRT4530_21638P.2 | Oryza sativa |
| 1272 | gl_3417405 | Saccharomyces cerevisiae |
| 1273 | MRT4565_3598P.3 | Triticum aestivum |
| 1274 | gl_33241266 | Prochlorococcus marinus subsp. |
| | | marinus str. CCMP1375 |
| 1275 | gl_97924 | Enterococcus hirae |
| 1276 | gl_23004108 | Magnetospirillum magnetotacticum |
| 1277 | gl_30316239 | Streptococcus pyogenes SSI-1 |
| 1278 | MRT4565_16589P.2 | Triticum aestivum |
| 1279 | gl_6599049 | Chlamydia trachomatis |
| 1280 | gl_11279332 | Populus x canescens |
| 1281 | gl_29840676 | Chlamydophila caviae GPIC |
| 1282 | gl_32417454 | Neurospora crassa |
| 1283 | gl_5305232 | Brassica napus |
| 1284 | gl_4063530 | Bixa orellana |
| 1285 | gl_26986827 | Pseudomonas putida KT2440 |
| 1286 | gl_32441888 | Brassica oleracea var. capitata |
| 1287 | gl_4218537 | Triticum sp. |
| 1288 | gl_21909656 | Streptococcus pyogenes MGAS315 |
| 1289 | gl_20330757 | Oryza sativa (japonica cultivar-group) |
| 1290 | gl_13474176 | Mesorhizobium loti |
| 1291 | gl_5616513 | Fragaria x ananassa |
| 1292 | gl_16943664 | Calibanus hookeri |
| 1293 | gl_5231202 | Streptococcus pneumoniae |
| 1294 | MRT4530_72752P.2 | Oryza sativa |
| 1295 | gl_15292855 | Arabidopsis thaliana |
| 1296 | gl_20136059 | Shigella dysenteriae |
| 1297 | gl_15209148 | Oryza sativa |
| 1298 | gl_7708452 | Irvingla malayana |
| 1299 | gl_30687843 | Arabidopsis thaliana |
| 1300 | gl_20269434 | Pouteria obovata |
| 1301 | gl_136253 | Geobacillus stearothermophilus |
| 1302 | gl_18976554 | Pyrococcus furiosus DSM 3638 |
| 1303 | gl_14495542 | Ipomoea nil |
| 1304 | gl_16330288 | Synechocystis sp. PCC 6803 |
| 1305 | gl_16800386 | Listeria innocua |
| 1306 | gl_21633427 | Maripa repens |
| 1307 | gl_28380199 | Brucella melitensis |
| 1308 | gl_3913004 | Lycopersicon esculentum |
| 1309 | gl_155435 | unidentified bacterium |
| 1310 | gl_23017117 | Thermobifida fusca |
| 1311 | gl_14718099 | Koeberlinia spinosa |
| 1312 | gl_15674362 | Streptococcus pyogenes M1 GAS |
| 1313 | gl_6017822 | Phytolacca americana |
| 1314 | gl_15807615 | Deinococcus radiodurans |
| 1315 | gl_14521960 | Pyrococcus abyssi |
| 1316 | gl_23111662 | Desulfitobacterium hafniense |
| 1317 | gl_15643288 | Thermotoga maritima |
| 1318 | MRT3847_269768P.1 | Glycine max |
| 1319 | gl_23308892 | Corynebacterium glutamicum ATCC 13032 |
| 1320 | gl_4063560 | Rhus copallina |
| 1321 | gl_7708311 | Hydnocarpus heterophylla |
| 1322 | MRT4565_24270P.3 | Triticum aestivum |
| 1323 | MRT3847_233522P.2 | Glycine max |
| 1324 | MRT4530_87659P.1 | Oryza sativa |
| 1325 | gl_15596894 | Pseudomonas aeruglnosa PAO1 |
| 1326 | gl_25028847 | Corynebacterium efficiens YS-314 |
| 1327 | gl_24379392 | Streptococcus mutans UA159 |
| 1328 | gl_11133033 | Lactobacillus leichmannii |
| 1329 | MRT4565_19576P.3 | Triticum aestivum |
| 1330 | gl_24940194 | Lithodora diffusa |
| 1331 | gl_16610205 | Physcomitrella patens |
| 1332 | MRT3847_212021P.2 | Glycine max |
| 1333 | gl_6970411 | Rosa rugosa |
| 1334 | gl_8745072 | Betula pendula |
| 1335 | gl_16122616 | Yersinia pestis CO92 |
| 1336 | gl_7708684 | Thesium humile |
| 1337 | gl_14718007 | Clarkia xantiana |
| 1338 | gl_7708474 | Lavandula bipinnata |
| 1339 | gl_14718107 | Lepuropetalon spathulatum |
| 1340 | gl_16444949 | Asperglllus oryzae |
| 1341 | gl_27363511 | Vibrio vulnificus CMCP6 |
| 1342 | gl_24559828 | Bradyrhizobium japonicum |
| 1343 | gl_848999 | Petunia integrifolia subsp. inflata |
| 1344 | gl_13489165 | Oryza sativa (japonica cultivar-group) |
| 1345 | gl_6273581 | Oenococcus oeni |
| 1346 | gl_6467949 | Persoonia katerae |
| 1347 | gl_1730065 | Sporosarcina psychrophila |
| 1348 | gl_23102311 | Azotobacter vinelandii |
| 1349 | gl_15639417 | Treponema pallidum |
| 1350 | gl_15235112 | Arabidopsis thaliana |
| 1351 | gl_16077989 | Bacillus subtilis subsp. subtilis str. 168 |
| 1352 | gl_7674382 | Buchnera aphidicola (Schlechtendalia chinensis) |
| 1353 | gl_10946499 | Hevea brasiliensis |
| 1354 | gl_30468052 | Cyanidioschyzon merolae |
| 1355 | gl_23002438 | Lactobacillus gasseri |
| 1356 | gl_29831992 | Streptomyces avermitilis MA-4680 |
| 1357 | gl_21401687 | Bacillus anthracis str. A2012 |
| 1358 | MRT4565_53782P.2 | Triticum aestivum |
| 1359 | gl_21282866 | Staphylococcus aureus subsp. aureus MW2 |
| 1360 | gl_27528482 | Saccharomyces castellii |
| 1361 | gl_21264381 | Vandenboschia davallioides |
| 1362 | gl_12004123 | Coris monspeliensis |
| 1363 | gl_7447961 | Gossypium hirsutum |
| 1364 | gl_22963535 | Rhodopseudomonas palustris |
| 1365 | gl_28804505 | Aster tripolium |
| 1366 | gl_3860313 | Cicer arietinum |
| 1367 | gl_27529083 | Torulaspora pretoriensis |
| 1368 | gl_4995111 | Colona floribunda |
| 1369 | gl_17987158 | Brucella melitensis 16M |
| 1370 | gl_25410916 | Arabidopsis thaliana |
| 1371 | gl_15219234 | Arabidopsis thaliana |
| 1372 | gl_5231193 | Streptococcus pneumoniae |
| 1373 | gl_7487385 | Arabidopsis thaliana |
| 1374 | gl_3913007 | Nicotiana tabacum |
| 1375 | gl_407635 | Mycoplasma genitalium |
| 1376 | gl_27529079 | Zygosaccharomyces bisporus |
| 1377 | gl_27380054 | Bradyrhizobium japonicum USDA 110 |
| 1378 | gl_15219603 | Arabidopsis thaliana |
| 1379 | gl_5001603 | Eucryphia cordifolia |
| 1380 | gl_15839668 | Mycobacterium tuberculosis CDC1551 |
| 1381 | gl_1142616 | Bacillus subtilis |
| 1382 | gl_28188335 | Coleochaete scutata |
| 1383 | gl_21674017 | Chlorobium tepidum TLS |
| 1384 | gl_27375757 | Bradyrhizobium japonicum USDA 110 |
| 1385 | MRT4565_57540P.2 | Triticum aestivum |
| 1386 | gl_4322323 | Nepenthes alata |
| 1387 | MRT4530_46211P.2 | Oryza sativa |
| 1388 | gl_27542603 | Xerophyta humilis |
| 1389 | gl_6687375 | Digltalis grandiflora |
| 1390 | gl_5758878 | Ensete ventricosum |
| 1391 | gl_23041315 | Trichodesmium erythraeum IMS101 |
| 1392 | gl_5001573 | Austrobaileya scandens |
| 1393 | gl_32526541 | Pennantia corymbosa |
| 1394 | gl_14718228 | Sparganium americanum |
| 1395 | gl_29420855 | Kluyveromyces lactis |
| 1396 | gl_15596695 | Pseudomonas aeruglnosa PAO1 |
| 1397 | gl_15616888 | Buchnera aphidicola str. APS |
| | | (Acyrthosiphon pisum) |
| 1398 | MRT4565_140767P.1 | Triticum aestivum |
| 1399 | gl_13812075 | Guillardia theta |
| 1400 | gl_21633323 | Calystegla macrostegla |
| 1401 | gl_23003622 | Lactobacillus gasseri |
| 1402 | gl_4206604 | Ptaeroxylon obliquum |
| 1403 | gl_29346709 | Bacteroides thetaiotaomicron VPI-5482 |
| 1404 | gl_15607423 | Mycobacterium tuberculosis H37Rv |
| 1405 | gl_32487515 | Oryza sativa (japonica cultivar-group) |
| 1406 | gl_20136003 | Shigella boydii |
| 1407 | gl_12004135 | Aeglceras corniculatum |
| 1408 | gl_2493121 | Beta vulgaris |
| 1409 | gl_12229704 | Halobacterium sp. NRC-1 |
| 1410 | gl_15425580 | Forstera bellidifolia |
| 1411 | MRT3847_218049P.2 | Glycine max |
| 1412 | gl_22980706 | Ralstonia metallidurans |
| 1413 | gl_2462109 | Bacillus cereus |
| 1414 | gl_5758877 | Dimerocostus strobilaceus |
| 1415 | gl_21667292 | Adenophorus abietinus |
| 1416 | gl_24940168 | Cordia macrostachya |
| 1417 | gl_18087505 | Cucumis melo |
| 1418 | MRT3847_286526P.1 | Glycine max |
| 1419 | gl_25287618 | Arabidopsis thaliana |
| 1420 | gl_23014725 | Magnetospirillum magnetotacticum |
| 1421 | gl_7708448 | Ipheion dialystemon |
| 1422 | MRT3847_98076P.3 | Glycine max |
| 1423 | MRT4565_130085P.1 | Triticum aestivum |
| 1424 | gl_14600685 | Aeropyrum pernix |
| 1425 | gl_20384957 | Nitella praelonga |
| 1426 | MRT3847_29836P.3 | Glycine max |
| 1427 | gl_461979 | Lycopersicon esculentum |
| 1428 | gl_8517628 | Maesa myrsinoides |
| 1429 | MRT3847_233523P.2 | Glycine max |
| 1430 | gl_6687199 | Callitriche heterophylla |
| 1431 | gl_32172455 | Thermus thermophilus |
| 1432 | MRT4530_113489P.2 | Oryza sativa |
| 1433 | gl_4138679 | Vicia faba |
| 1434 | gl_14586373 | Arabidopsis thaliana |
| 1435 | MRT4530_122939P.2 | Oryza sativa |
| 1436 | gl_7488751 | Medicago sativa |
| 1437 | gl_6687379 | Decumaria barbara |
| 1438 | gl_12585499 | Eremothecium gossypii |
| 1439 | gl_7708260 | Cobaea scandens |
| 1440 | gl_13474110 | Mesorhizobium loti |
| 1441 | gl_29420835 | Saccharomyces cerevisiae |
| 1442 | gl_30171291 | Vitis vinifera |
| 1443 | gl_7688335 | Tetramerista sp. Coode 7925 |
| 1444 | gl_20136057 | Shigella dysenteriae |
| 1445 | gl_23133994 | Synechococcus sp. WH 8102 |
| 1446 | gl_4206598 | Sarcomelicope simplicifolia |
| 1447 | gl_29726150 | Pteridophyllum racemosum |
| 1448 | gl_18075915 | Columellia oblonga |
| 1449 | gl_18400939 | Arabidopsis thaliana |
| 1450 | gl_29840325 | Chlamydophila caviae GPIC |
| 1451 | gl_12004111 | Myrsine africana |
| 1452 | gl_4097515 | Nicotiana tabacum |
| 1453 | gl_15614227 | Bacillus halodurans |
| 1454 | gl_18309344 | Clostridium perfringens str. 13 |
| 1455 | gl_24460025 | Synechococcus sp. PCC 7002 |
| 1456 | gl_6689000 | Proboscidea louisianica |
| 1457 | gl_6456469 | Taraxacum officinale |
| 1458 | gl_27475608 | Medicago truncatula |
| 1459 | gl_4584556 | Beta vulgaris |
| 1460 | gl_30696138 | Arabidopsis thaliana |
| 1461 | gl_21633425 | Maripa glabra |
| 1462 | gl_20805971 | Chlamydia trachomatis |
| 1463 | gl_2541885 | Cyanidioschyzon merolae |
| 1464 | gl_14718189 | Populus tremuloides |
| 1465 | MRT3847_52308P.3 | Glycine max |
| 1466 | gl_22299818 | Thermosynechococcus elongatus BP-1 |
| 1467 | gl_6724287 | Ophioglossum reticulatum |
| 1468 | gl_14718038 | Durio zibethinus |
| 1469 | gl_7708191 | Catalpa bignonioides |
| 1470 | gl_1706547 | Hevea brasiliensis |
| 1471 | gl_400142 | Hypocrea jecorina |
| 1472 | gl_30248703 | Nitrosomonas europaea ATCC 19718 |
| 1473 | gl_4995856 | Sparrmannia ricinocarpa |
| 1474 | gl_6687737 | Hydrolea ovata |
| 1475 | gl_7708491 | Megacarpaea polyandra |
| 1476 | gl_7706839 | Averrhoa carambola |
| 1477 | gl_22972296 | Chloroflexus aurantiacus |
| 1478 | gl_13541851 | Thermoplasma volcanium |
| 1479 | gl_19705057 | Fusobacterium nucleatum subsp. nucleatum ATCC 25586 |
| 1480 | gl_19553182 | Corynebacterium glutamicum ATCC 13032 |
| 1481 | gl_4103346 | Cucumis sativus |
| 1482 | gl_1568513 | Petunia x hybrida |
| 1483 | gl_11465848 | Porphyra purpurea |
| 1484 | MRT3847_61026P.3 | Glycine max |
| 1485 | gl_29827972 | Streptomyces avermitilis MA-4680 |
| 1486 | gl_15234470 | Arabidopsis thaliana |
| 1487 | gl_7708173 | Bougainvillea glabra |
| 1488 | gl_4206564 | Cneorum pulverulentum |
| 1489 | MRT4530_76823P.2 | Oryza sativa |
| 1490 | MRT4565_110825P.1 | Triticum aestivum |
| 1491 | MRT4565_23334P.2 | Triticum aestivum |
| 1492 | gl_11467528 | Odontella sinensis |
| 1493 | gl_26989025 | Pseudomonas putida KT2440 |
| 1494 | gl_409778 | Cyanidium caldarium |
| 1495 | gl_99998 | Phaseolus vulgaris |
| 1496 | gl_11513797 | Salmonella typhimurium |
| 1497 | gl_10953877 | Hordeum vulgare subsp. vulgare |
| 1498 | gl_14587183 | Hanguana malayana |
| 1499 | gl_23502927 | Brucella suis 1330 |
| 1500 | gl_27904521 | Buchnera aphidicola str. Bp (Baizongla pistaciae) |
| 1501 | gl_21684885 | Lachnocaulon anceps |
| 1502 | gl_4033432 | Agrobacterium vitis |
| 1503 | gl_27447657 | Lycopersicon esculentum |
| 1504 | MRT4530_147074P.1 | Oryza sativa |
| 1505 | gl_15891188 | Agrobacterium tumefaciens str. C58 (Cereon) |
| 1506 | gl_23108488 | Novosphingobium aromaticivorans |
| 1507 | MRT4530_111094P.1 | Oryza sativa |
| 1508 | gl_21593407 | Arabidopsis thaliana |
| 1509 | gl_21633355 | Hildebrandtia africana |
| 1510 | gl_902938 | Glycine max |
| 1511 | gl_6467950 | Acorus gramineus |
| 1512 | gl_7708552 | Plumeria obtusa |
| 1513 | gl_24373361 | Shewanella oneidensis MR-1 |
| 1514 | gl_23467432 | Haemophilus somnus 129PT |
| 1515 | gl_15894323 | Clostridium acetobutylicum |
| 1516 | gl_12643655 | Agaricus bisporus |
| 1517 | gl_5758914 | Sparganium eurycarpum |
| 1518 | gl_16416748 | Marsilea drummondii |
| 1519 | gl_4995761 | Paramelhania decaryana |
| 1520 | gl_20385590 | Vitis vinifera |
| 1521 | gl_20530741 | Ipomoea batatas |
| 1522 | gl_6689111 | Rhynchoglossum notonianum |
| 1523 | gl_6689410 | Tagetes sp. Nickrent 3061 |
| 1524 | gl_20135989 | Shigella boydii |
| 1525 | gl_26190149 | Physcomitrella patens |
| 1526 | gl_28898813 | Vibrio parahaemolyticus RIMD 2210633 |
| 1527 | gl_19745323 | Streptococcus pyogenes MGAS8232 |
| 1528 | gl_13620169 | Capsella rubella |
| 1529 | gl_15834703 | Chlamydia muridarum |
| 1530 | MRT3847_6971P.3 | Glycine max |
| 1531 | gl_5830469 | Medicago sativa |
| 1532 | gl_775168 | Escherichia coli |
| 1533 | gl_142369 | Azotobacter vinelandii |
| 1534 | gl_11498766 | Archaeoglobus fulgldus DSM 4304 |
| 1535 | gl_28564015 | Saccharomyces bayanus |
| 1536 | MRT3847_208509P.3 | Glycine max |
| 1537 | gl_27468813 | Staphylococcus epidermidis ATCC 12228 |
| 1538 | gl_24113065 | Shigella flexneri 2a str. 301 |
| 1539 | gl_2130078 | Oryza sativa |
| 1540 | gl_261212 | Pisum sativum |
| 1541 | gl_15901171 | Streptococcus pneumoniae TIGR4 |
| 1542 | gl_19033077 | Cosmocladium perissum |
| 1543 | MRT4530_104183P.1 | Oryza sativa |
| 1544 | gl_5001589 | Kingdonia uniflora |
| 1545 | MRT4565_8769P.3 | Triticum aestivum |
| 1546 | gl_7546983 | Lactococcus lactis |
| 1547 | MRT3847_10488P.3 | Glycine max |
| 1548 | gl_4995715 | Matisia cordata |
| 1549 | gl_16124956 | Caulobacter crescentus CB15 |
| 1550 | gl_27887595 | Fusobacterium nucleatum subsp. vincentii ATCC 49256 |
| 1551 | gl_24940264 | Echiochilon pauciflorum |
| 1552 | gl_4206602 | Eremocitrus glauca |
| 1553 | gl_24940248 | Nonea versicolor |
| 1554 | gl_24215987 | Leptospira interrogans serovar lai str. 56601 |
| 1555 | gl_20136089 | Escherichia coli |
| 1556 | gl_4995105 | Dombeya sp. Chase 273 |
| 1557 | gl_8272441 | Streptococcus mutans |
| 1558 | gl_10955560 | Yersinia enterocolitica |
| 1559 | gl_16759429 | Salmonella enterica subsp. enterica serovar Typhi |
| 1560 | gl_401322 | Gossypium hirsutum |
| 1561 | gl_3777497 | Hordeum vulgare subsp. vulgare |
| 1562 | gl_14194485 | Galdieria sulphuraria |
| 1563 | MRT4565_26535P.2 | Triticum aestivum |
| 1564 | gl_729238 | Ralstonia eutropha |
| 1565 | gl_27435896 | Saglttaria latifolia |
| 1566 | gl_32441504 | Agrocybe aegerita |
| 1567 | MRT4530_81439P.1 | Oryza sativa |
| 1568 | gl_15901640 | Streptococcus pneumoniae TIGR4 |
| 1569 | MRT3847_42675P.2 | Glycine max |
| 1570 | MRT3847_24864P.2 | Glycine max |
| 1571 | gl_3169287 | Gossypium hirsutum |
| 1572 | gl_6324923 | Saccharomyces cerevisiae |
| 1573 | gl_2493099 | Haloferax volcanii |
| 1574 | gl_22983077 | Burkholderia fungorum |
| 1575 | gl_147276 | Escherichia coli |
| 1576 | MRT4530_27060P.2 | Oryza sativa |
| 1577 | gl_27804365 | Chrysanthemum x morifolium |
| 1578 | gl_16127677 | Caulobacter crescentus CB15 |
| 1579 | MRT3847_33513P.3 | Glycine max |
| 1580 | gl_3212365 | Salmonella typhimurium |
| 1581 | MRT4565_38061P.3 | Triticum aestivum |
| 1582 | gl_32409603 | Neurospora crassa |
| 1583 | gl_15924664 | Staphylococcus aureus subsp. aureus Mu50 |
| 1584 | gl_21684909 | Pharus parvifolius |
| 1585 | gl_23501986 | Brucella suis 1330 |
| 1586 | gl_20384955 | Chara rusbyana |
| 1587 | gl_15835199 | Chlamydia muridarum |
| 1588 | gl_3850926 | Isopogon buxifolius |
| 1589 | gl_12004137 | Lysimachia maxima |
| 1590 | MRT4530_146073P.1 | Oryza sativa |
| 1591 | gl_27804891 | Myxococcus xanthus |
| 1592 | gl_13540883 | Thermoplasma volcanium |
| 1593 | gl_7708468 | Lactoris fernandeziana |
| 1594 | gl_15645984 | Helicobacter pylori 26695 |
| 1595 | gl_15618021 | Chlamydophila pneumoniae CWL029 |
| 1596 | gl_29134857 | Hordeum vulgare subsp. vulgare |
| 1597 | gl_30021917 | Bacillus cereus ATCC 14579 |
| 1598 | gl_4995858 | Tilia platyphyllos |
| 1599 | gl_27528478 | Saccharomyces exiguus |
| 1600 | gl_2493120 | Acetabularia acetabulum |
| 1601 | MRT4530_103360P.1 | Oryza sativa |
| 1602 | gl_5758911 | Sansevieria socotrana |
| 1603 | gl_12005284 | Amborella trichopoda |
| 1604 | gl_18077603 | Polyosma cunninghamii |
| 1605 | gl_16973296 | Malus x domestica |
| 1606 | MRT4530_76824P.2 | Oryza sativa |
| 1607 | gl_2098385 | Salmonella typhimurium |
| 1608 | gl_20269069 | Sesbania rostrata |
| 1609 | MRT4565_41750P.3 | Triticum aestivum |
| 1610 | gl_3668069 | Lycopersicon esculentum |
| 1611 | gl_21633423 | Dicranostyles mildbraediana |
| 1612 | gl_11466794 | Oryza sativa (japonica cultivar-group) |
| 1613 | gl_5758910 | Ruscus aculeatus |
| 1614 | MRT4530_18787P.2 | Oryza sativa |
| 1615 | gl_14718095 | Kiggelaria africana |
| 1616 | gl_23051710 | Methanosarcina barkeri |
| 1617 | gl_7716952 | Medicago truncatula |
| 1618 | MRT4530_37726P.2 | Oryza sativa |
| 1619 | gl_27367975 | Vibrio vulnificus CMCP6 |
| 1620 | gl_5834682 | Rhizobium etli |
| 1621 | gl_15231135 | Arabidopsis thaliana |
| 1622 | MRT4530_14452P.1 | Oryza sativa |
| 1623 | gl_21226882 | Methanosarcina mazei Goe1 |
| 1624 | gl_15595233 | Pseudomonas aeruglnosa PAO1 |
| 1625 | gl_29654073 | Coxiella burnetii RSA 493 |
| 1626 | gl_12004113 | Grammadenia sp. Stahl 1579 |
| 1627 | gl_16329464 | Synechocystis sp. PCC 6803 |
| 1628 | gl_20269418 | Heliamphora sp. Anderberg s.n. |
| 1629 | gl_14718222 | Shepherdia canadensis |
| 1630 | gl_22128591 | Petunia x hybrida |
| 1631 | gl_23054147 | Geobacter metallireducens |
| 1632 | gl_24528335 | Emericella nidulans |
| 1633 | gl_32441506 | Pleurotus ostreatus |
| 1634 | gl_29345937 | Bacteroides thetaiotaomicron VPI-5482 |
| 1635 | gl_7489434 | Hordeum vulgare |
| 1636 | gl_23006623 | Magnetospirillum magnetotacticum |
| 1637 | gl_15794478 | Neisseria meningltidis Z2491 |
| 1638 | gl_1791247 | Chlamydia trachomatis |
| 1639 | gl_14718003 | Chrysobalanus icaco |
| 1640 | gl_6017806 | Itea ilicifolia |
| 1641 | gl_7489096 | Nicotiana sylvestris |
| 1642 | gl_19552720 | Corynebacterium glutamicum ATCC 13032 |
| 1643 | MRT3847_223708P.3 | Glycine max |
| 1644 | MRT4565_4354P.3 | Triticum aestivum |
| 1645 | gl_4433778 | Hydrogenophilus thermoluteolus |
| 1646 | gl_119006 | Phaseolus vulgaris |
| 1647 | gl_15605438 | Chlamydia trachomatis |
| 1648 | gl_15795149 | Arabidopsis thaliana |
| 1649 | gl_67842 | Spinacia oleracea |
| 1650 | gl_10953875 | Hordeum vulgare subsp. vulgare |
| 1651 | gl_1041768 | Acer pseudoplatanus |
| 1652 | gl_15966542 | Sinorhizobium meliloti |
| 1653 | gl_22960295 | Rhodobacter sphaeroides |
| 1654 | gl_16761259 | Salmonella enterica subsp. enterica serovar Typhi |
| 1655 | MRT4530_87660P.1 | Oryza sativa |
| 1656 | gl_24940196 | Buglossoides arvensis |
| 1657 | MRT3847_37502P.1 | Glycine max |
| 1658 | gl_23429044 | Cocos nucifera |
| 1659 | gl_14718153 | Nuphar variegata |
| 1660 | gl_18379267 | Arabidopsis thaliana |
| 1661 | gl_20807894 | Thermoanaerobacter tengcongensis |
| 1662 | gl_23010914 | Magnetospirillum magnetotacticum |
| 1663 | gl_28212071 | Clostridium tetani E88 |
| 1664 | MRT4565_106072P.1 | Triticum aestivum |
| 1665 | gl_23053574 | Geobacter metallireducens |
| 1666 | gl_18978077 | Pyrococcus furiosus DSM 3638 |
| 1667 | gl_30248063 | Nitrosomonas europaea ATCC 19718 |
| 1668 | gl_12006484 | Calystegla sepium |
| 1669 | gl_11465459 | Cyanidium caldarium |
| 1670 | gl_7708256 | Cinchona pubescens |
| 1671 | gl_19112558 | Schizosaccharomyces pombe |
| 1672 | gl_22328782 | Arabidopsis thaliana |
| 1673 | gl_15639519 | Treponema pallidum |
| 1674 | gl_7573598 | Populus nigra |
| 1675 | gl_136266 | Thermus thermophilus |
| 1676 | gl_3915597 | Arabidopsis thaliana |
| 1677 | gl_29840442 | Chlamydophila caviae GPIC |
| 1678 | MRT3847_33514P.2 | Glycine max |
| 1679 | gl_22991262 | Enterococcus faecium |
| 1680 | gl_4206592 | Lunasia amara |
| 1681 | gl_28188331 | Coleochaete sp. 18b3 |
| 1682 | gl_7708163 | Barringtonia asiatica |
| 1683 | MRT4565_61922P.2 | Triticum aestivum |
| 1684 | gl_15828707 | Mycoplasma pulmonis |
| 1685 | gl_23000680 | Magnetococcus sp. MC-1 |
| 1686 | gl_3850958 | Macadamia jansenii |
| 1687 | gl_8452718 | Parnassia palustris |
| 1688 | gl_32441499 | Stropharia aeruglnosa |
| 1689 | MRT3847_257212P.1 | Glycine max |
| 1690 | gl_14718224 | Siphonodon celastrineus |
| 1691 | MRT3847_213371P.3 | Glycine max |
| 1692 | gl_15800168 | Escherichia coli O157:H7 EDL933 |
| 1693 | gl_15921917 | Sulfolobus tokodaii |
| 1694 | gl_28565038 | Kluyveromyces lactis |
| 1695 | gl_21633383 | Wilsonia backhousei |
| 1696 | gl_25814821 | Stigmatella aurantiaca |
| 1697 | gl_16801989 | Listeria innocua |
| 1698 | gl_28194504 | Medicago truncatula |
| 1699 | gl_12004127 | Ardisiandra wettsteinii |
| 1700 | gl_23466988 | Haemophilus somnus 129PT |
| 1701 | gl_6729356 | Selenomonas ruminantium |
| 1702 | gl_25346630 | Arabidopsis thaliana |
| 1703 | gl_14520674 | Pyrococcus abyssi |
| 1704 | MRT4565_118038P.1 | Triticum aestivum |
| 1705 | gl_7688339 | Trigonobalanus verticillata |
| 1706 | gl_22298053 | Thermosynechococcus elongatus BP-1 |
| 1707 | gl_5911463 | Agaricus bisporus |
| 1708 | gl_23131734 | Prochlorococcus marinus str. MIT 9313 |
| 1709 | gl_7687964 | Brasenia schreberi |
| 1710 | gl_4883425 | Cicer arietinum |
| 1711 | MRT4530_28144P.1 | Oryza sativa |
| 1712 | gl_3913035 | Trifolium repens |
| 1713 | gl_19033061 | Tolypella prolifera |
| 1714 | gl_6970413 | Rosa rugosa |
| 1715 | gl_22962067 | Rhodopseudomonas palustris |
| 1716 | MRT3847_11589P.3 | Glycine max |
| 1717 | gl_28901282 | Vibrio parahaemolyticus RIMD 2210633 |
| 1718 | gl_3850988 | Grevillea baileyana |
| 1719 | gl_17988331 | Brucella melitensis 16M |
| 1720 | gl_7708153 | Antirrhinum majus |
| 1721 | gl_136261 | Methanothermobacter marburgensis str. Marburg |
| 1722 | gl_32490885 | Wigglesworthia glossinidia endosymbiont of Glossina brevipalpis |
| 1723 | gl_27528472 | Saccharomyces cariocanus |
| 1724 | gl_21399162 | Bacillus anthracis str. A2012 |
| 1725 | gl_28867399 | Pseudomonas syringae pv. tomato str. DC3000 |
| 1726 | gl_15425576 | Escallonia rubra |
| 1727 | gl_1004320 | Sulfolobus solfataricus |
| 1728 | gl_23465516 | Bifidobacterium longum NCC2705 |
| 1729 | gl_11357336 | Arabidopsis thaliana |
| 1730 | MRT4530_104720P.2 | Oryza sativa |
| 1731 | gl_20136053 | Shigella dysenteriae |
| 1732 | MRT4530_120903P.1 | Oryza sativa |
| 1733 | gl_22966395 | Rhodospirillum rubrum |
| 1734 | gl_9799472 | Mytilaria laosensis |
| 1735 | gl_23503627 | Pseudocarteria mucosa |
| 1736 | gl_2500204 | Corynebacterium ammoniagenes |
| 1737 | gl_6017838 | Heuchera sanguinea |
| 1738 | gl_6225174 | Yersinia enterocolitica |
| 1739 | MRT3847_36848P.3 | Glycine max |
| 1740 | gl_30019391 | Bacillus cereus ATCC 14579 |
| 1741 | gl_17987729 | Brucella melitensis 16M |
| 1742 | gl_12004139 | Lysimachia minoricensis |
| 1743 | MRT4530_87661P.1 | Oryza sativa |
| 1744 | gl_18075929 | Escallonia resinosa |
| 1745 | gl_22091479 | Daucus carota subsp. sativus |
| 1746 | gl_29893654 | Oryza sativa (japonica cultivar-group) |
| 1747 | gl_24940180 | Echium vulgare |
| 1748 | gl_30267072 | Ipomoea umbraticola |
| 1749 | gl_3702409 | Cichorium intybus x Cichorium endivia |
| 1750 | MRT3847_215323P.2 | Glycine max |
| 1751 | gl_15965009 | Sinorhizobium meliloti |
| 1752 | gl_14717924 | Agave ghiesbreghtii |
| 1753 | gl_16416736 | Isoetes engelmannii |
| 1754 | gl_6318287 | Thermoproteus tenax |
| 1755 | gl_7708658 | Stackhousia minima |
| 1756 | gl_28071332 | Oryza sativa (japonica cultivar-group) |
| 1757 | gl_14574707 | Nostoc punctiforme |
| 1758 | gl_17646111 | Nicotiana tabacum |
| 1759 | gl_25089839 | Parthenium argentatum |
| 1760 | gl_15668390 | Methanocaldococcus jannaschii |
| 1761 | gl_11497535 | Spinacia oleracea |
| 1762 | gl_16549060 | Magnolia praecocissima |
| 1763 | gl_22265999 | Hordeum vulgare |
| 1764 | gl_20269416 | Halesia carolina |
| 1765 | gl_15673109 | Lactococcus lactis subsp. lactis |
| 1766 | gl_6688636 | Melanophylla alnifolia |
| 1767 | gl_28380210 | Azospirillum brasilense |
| 1768 | MRT4530_25301P.1 | Oryza sativa |
| 1769 | gl_29420861 | Saccharomyces exiguus |
| 1770 | MRT3847_199862P.2 | Glycine max |
| 1771 | gl_6689307 | Sesamum indicum |
| 1772 | gl_4887235 | Hyacinthus orientalis |
| 1773 | MRT4530_10021P.1 | Oryza sativa |
| 1774 | gl_15893448 | Clostridium acetobutylicum |
| 1775 | gl_32526543 | Pennantia cunninghamii |
| 1776 | gl_7708268 | Dicella nucifera |
| 1777 | gl_4995183 | Hermannia erodioides |
| 1778 | gl_7489198 | Nicotiana tabacum |
| 1779 | MRT4530_100340P.1 | Oryza sativa |
| 1780 | MRT4565_9771P.3 | Triticum aestivum |
| 1781 | MRT4530_19282P.1 | Oryza sativa |
| 1782 | gl_15425560 | Brunonia australis |
| 1783 | MRT4530_103362P.1 | Oryza sativa |
| 1784 | gl_12004115 | Douglasia nivalis |
| 1785 | gl_4063542 | Cupaniopsis anacardioides |
| 1786 | gl_4995798 | Schoutenia glomerata |
| 1787 | gl_19698536 | Hordeum vulgare subsp. vulgare |
| 1788 | gl_30265620 | Ipomoea cordatotriloba |
| 1789 | gl_20146358 | Oryza sativa (japonica cultivar-group) |
| 1790 | gl_29349251 | Bacteroides thetaiotaomicron VPI-5482 |
| 1791 | gl_24940174 | Cystostemon heliocharis |
| 1792 | gl_23465557 | Bifidobacterium longum NCC2705 |
| 1793 | gl_14718151 | Nolina recurvata |
| 1794 | gl_13508042 | Mycoplasma pneumoniae |
| 1795 | gl_22960297 | Rhodobacter sphaeroides |
| 1796 | gl_6689231 | Scrophularia californica |
| 1797 | MRT3847_53577P.3 | Glycine max |
| 1798 | MRT3847_58239P.2 | Glycine max |
| 1799 | gl_15236304 | Arabidopsis thaliana |
| 1800 | MRT4530_140459P.1 | Oryza sativa |
| 1801 | gl_6226270 | Mycobacterium intracellulare |
| 1802 | gl_23050672 | Methanosarcina barkeri |
| 1803 | gl_3334408 | Acetabularia acetabulum |
| 1804 | gl_25409314 | Halobacterium sp. NRC-1 |
| 1805 | gl_30263713 | Bacillus anthracis str. Ames |
| 1806 | gl_5305242 | Brassica rapa |
| 1807 | gl_18407057 | Arabidopsis thaliana |
| 1808 | gl_22970179 | Chloroflexus aurantiacus |
| 1809 | gl_15608751 | Mycobacterium tuberculosis H37Rv |
| 1810 | gl_27904899 | Buchnera aphidicola str. Bp (Baizongla pistaciae) |
| 1811 | MRT4530_37728P.2 | Oryza sativa |
| 1812 | MRT4530_87778P.1 | Oryza sativa |
| 1813 | gl_14279306 | Vitis vinifera |
| 1814 | MRT4530_14454P.2 | Oryza sativa |
| 1815 | gl_6689408 | Titanotrichum oldhamii |
| 1816 | gl_23137115 | Cytophaga hutchinsonii |
| 1817 | gl_17227784 | Nostoc sp. PCC 7120 |
| 1818 | gl_21633339 | Aniseia cernua |
| 1819 | gl_13473275 | Mesorhizobium loti |
| 1820 | gl_7688337 | Trema micrantha |
| 1821 | gl_20136019 | Shigella flexneri |
| 1822 | gl_15791717 | Campylobacter jejuni subsp. jejuni NCTC 11168 |
| 1823 | gl_7708622 | Rourea minor |
| 1824 | gl_15639499 | Treponema pallidum |
| 1825 | gl_7708442 | Fouquieria columnaris |
| 1826 | gl_11558464 | Deutzia rubens |
| 1827 | gl_4995792 | Ruizia cordata |
| 1828 | gl_6706180 | Gilia capitata |
| 1829 | gl_18075917 | Desfontainia spinosa |
| 1830 | gl_12655901 | Brassica napus |
| 1831 | gl_15217662 | Arabidopsis thaliana |
| 1832 | gl_11321164 | Capsicum annuum |
| 1833 | gl_14718030 | Dialypetalanthus fuscescens |
| 1834 | gl_7271955 | Lilium longlflorum |
| 1835 | MRT4565_9346P.3 | Triticum aestivum |
| 1836 | MRT3847_242965P.2 | Glycine max |
| 1837 | gl_16760154 | Salmonella enterica subsp. enterica serovar Typhi |
| 1838 | gl_21633381 | Wilsonia humilis |
| 1839 | gl_19033051 | Chara connivens |
| 1840 | gl_23135446 | Cytophaga hutchinsonii |
| 1841 | MRT3847_36849P.2 | Glycine max |
| 1842 | gl_20093841 | Methanopyrus kandleri AV19 |
| 1843 | gl_15608935 | Mycobacterium tuberculosis H37Rv |
| 1844 | gl_460160 | Saccharomyces cerevisiae |
| 1845 | gl_15227441 | Arabidopsis thaliana |
| 1846 | gl_15616426 | Bacillus halodurans |
| 1847 | gl_6689309 | Sollya heterophylla |
| 1848 | gl_7708558 | Pouteria macrantha |
| 1849 | gl_5922599 | Allium macrostemon |
| 1850 | gl_13474231 | Mesorhizobium loti |
| 1851 | gl_11467561 | Odontella sinensis |
| 1852 | gl_29427825 | Lycopersicon peruvianum |
| 1853 | gl_1469934 | Nicotiana glutinosa |
| 1854 | gl_23475131 | Desulfovibrio desulfuricans G20 |
| 1855 | gl_11278993 | Lycopersicon esculentum |
| 1856 | gl_125607 | Emericella nidulans |
| 1857 | gl_6467935 | Triglochin maritimum |
| 1858 | gl_21633369 | Breweria rotundifolia |
| 1859 | gl_28194506 | Lotus japonicus |
| 1860 | MRT3847_272723P.1 | Glycine max |
| 1861 | gl_5758895 | Maranta bicolor |
| 1862 | gl_15673314 | Lactococcus lactis subsp. lactis |
| 1863 | gl_5031147 | Trochodendron aralioides |
| 1864 | gl_3850922 | Petrophile circinata |
| 1865 | gl_16332067 | Synechocystis sp. PCC 6803 |
| 1866 | gl_25028545 | Corynebacterium efficiens YS-314 |
| 1867 | gl_21684891 | Paepalanthus fasciculatus |
| 1868 | gl_15602518 | Pasteurella multocida |
| 1869 | gl_24940260 | Phacelia grandiflora |
| 1870 | gl_22997030 | Xylella fastidiosa Ann-1 |
| 1871 | gl_20805999 | Chlamydia trachomatis |
| 1872 | gl_15604535 | Rickettsia prowazekii |
| 1873 | gl_7489412 | Hordeum vulgare |
| 1874 | gl_6687660 | Guettarda uruguensis |
| 1875 | gl_6687201 | Cyrtandra hawaiensis |
| 1876 | gl_23052059 | Methanosarcina barkeri |
| 1877 | MRT4565_52146P.2 | Triticum aestivum |
| 1878 | gl_21244070 | Xanthomonas axonopodis pv. citri str. 306 |
| 1879 | gl_19033063 | Coleochaete orbicularis |
| 1880 | gl_20808006 | Thermoanaerobacter tengcongensis |
| 1881 | gl_20136051 | Shigella dysenteriae |
| 1882 | gl_5758894 | Liriope muscari |
| 1883 | gl_7708454 | Jasminum polyanthum |
| 1884 | gl_5834521 | Cichorium intybus x Cichorium endivia |
| 1885 | gl_30682129 | Arabidopsis thaliana |
| 1886 | gl_16122303 | Yersinia pestis CO92 |
| 1887 | MRT4565_88207P.2 | Triticum aestivum |
| 1888 | gl_23023390 | Leuconostoc mesenteroides subsp. mesenteroides ATCC 8293 |
| 1889 | gl_6689006 | Phyllonoma laticuspis |
| 1890 | gl_11465473 | Cyanidium caldarium |
| 1891 | MRT3847_284135P.1 | Glycine max |
| 1892 | gl_15611020 | Mycobacterium tuberculosis H37Rv |
| 1893 | gl_23103063 | Azotobacter vinelandii |
| 1894 | gl_322787 | Solanum tuberosum |
| 1895 | gl_30351931 | Brimeura amethystina |
| 1896 | gl_231596 | Cuscuta reflexa |
| 1897 | gl_14626277 | Oryza sativa (japonica cultivar-group) |
| 1898 | gl_20136039 | Shigella flexneri |
| 1899 | MRT3847_98062P.3 | Glycine max |
| 1900 | gl_24940164 | Buglossoides purpurocaerulea |
| 1901 | gl_7487603 | Arabidopsis thaliana |
| 1902 | gl_29828077 | Streptomyces avermitilis MA-4680 |
| 1903 | gl_1072952 | Thermus aquaticus |
| 1904 | gl_320885 | Asperglllus niger |
| 1905 | gl_20465197 | Bartonella henselae |
| 1906 | gl_28971666 | Burkholderia multivorans |
| 1907 | MRT4565_34024P.3 | Triticum aestivum |
| 1908 | gl_4218160 | Gerbera hybrid cv. [Terra Reglna] |
| 1909 | gl_136260 | Lactobacillus casei |
| 1910 | gl_29375625 | Enterococcus faecalis V583 |
| 1911 | gl_30267058 | Ipomoea nil |
| 1912 | gl_1345505 | Arabidopsis thaliana |
| 1913 | gl_28373459 | Salmonella typhimurium |
| 1914 | MRT4565_60761P.2 | Triticum aestivum |
| 1915 | gl_16416738 | Tmesipteris obliqua |
| 1916 | gl_27528498 | Saccharomyces servazzii |
| 1917 | gl_4995717 | Muntingla calabura |
| 1918 | gl_15827655 | Mycobacterium leprae |
| 1919 | gl_27550061 | Photorhabdus luminescens |
| 1920 | gl_24940266 | Tiquilia plicata |
| 1921 | gl_21219540 | Streptomyces coelicolor A3(2) |
| 1922 | gl_16416760 | Sphagnum palustre |
| 1923 | gl_4063540 | Cistus revolii |
| 1924 | MRT4565_127690P.1 | Triticum aestivum |
| 1925 | gl_6687548 | Erithalis fruticosa |
| 1926 | gl_17933944 | Agrobacterium tumefaciens str. C58 (U. Washington) |
| 1927 | gl_15678973 | Methanothermobacter thermautotrophicus str. Delta H |
| 1928 | gl_21593950 | Arabidopsis thaliana |
| 1929 | gl_602764 | Arabidopsis thaliana |
| 1930 | gl_14717984 | Callitriche heterophylla |
| 1931 | gl_3913209 | Rhodobacter sphaeroides |
| 1932 | MRT3847_61998P.3 | Glycine max |
| 1933 | gl_15229157 | Arabidopsis thaliana |
| 1934 | gl_7484643 | Beta vulgaris |
| 1935 | gl_22331664 | Arabidopsis thaliana |
| 1936 | gl_22962301 | Rhodopseudomonas palustris |
| 1937 | MRT4565_25946P.3 | Triticum aestivum |
| 1938 | gl_15027611 | Cryptococcus neoformans var. grubii |
| 1939 | gl_5758891 | Hemerocallis lilioasphodelus |
| 1940 | gl_15616928 | Buchnera aphidicola str. APS (Acyrthosiphon pisum) |
| 1941 | gl_12004117 | Dodecatheon meadia |
| 1942 | gl_15604890 | Chlamydia trachomatis |
| 1943 | gl_4103486 | Pinus radiata |
| 1944 | gl_32441496 | Trametes versicolor |
| 1945 | gl_541528 | Cyanidium caldarium |
| 1946 | gl_6225163 | Azospirillum brasilense |
| 1947 | gl_23019267 | Thermobifida fusca |
| 1948 | gl_22328179 | Arabidopsis thaliana |
| 1949 | gl_11034791 | Gnetum gnemon |
| 1950 | gl_21673370 | Chlorobium tepidum TLS |
| 1951 | gl_23473416 | Desulfovibrio desulfuricans G20 |
| 1952 | gl_27904753 | Buchnera aphidicola str. Bp (Baizongla pistaciae) |
| 1953 | gl_15425574 | Echinops bannaticus |
| 1954 | gl_15827806 | Mycobacterium leprae |
| 1955 | gl_7708560 | Prostanthera ovalifolia |
| 1956 | MRT4565_113424P.1 | Triticum aestivum |
| 1957 | gl_7486722 | Arabidopsis thaliana |
| 1958 | gl_23469166 | Pseudomonas syringae pv. syringae B728a |
| 1959 | gl_16800736 | Listeria innocua |
| 1960 | gl_23128273 | Nostoc punctiforme |
| 1961 | gl_18077605 | Quintinia verdonii |
| 1962 | gl_16129807 | Escherichia coli K12 |
| 1963 | gl_21220152 | Streptomyces coelicolor A3(2) |
| 1964 | gl_16973298 | Malus x domestica |
| 1965 | gl_464145 | Hordeum vulgare subsp. vulgare |
| 1966 | gl_28564205 | Saccharomyces castellii |
| 1967 | gl_7708304 | Frankenia pulverulenta |
| 1968 | gl_19881581 | Oryza sativa (japonica cultivar-group) |
| 1969 | gl_5305244 | Brassica oleracea |
| 1970 | gl_22990852 | Enterococcus faecium |
| 1971 | gl_21553510 | Arabidopsis thaliana |
| 1972 | gl_18310374 | Clostridium perfringens str. 13 |
| 1973 | gl_16263937 | Sinorhizobium meliloti |
| 1974 | gl_5758899 | Musa acuminata |
| 1975 | MRT4530_27618P.1 | Oryza sativa |
| 1976 | gl_15594693 | Borrelia burgdorferi B31 |
| 1977 | gl_14717950 | Barbeya oleoides |
| 1978 | MRT4530_19284P.1 | Oryza sativa |
| 1979 | MRT3847_16287P.3 | Glycine max |
| 1980 | gl_16764728 | Salmonella typhimurium LT2 |
| 1981 | gl_7708187 | Carallia brachiata |
| 1982 | gl_4206576 | Calodendrum capense |
| 1983 | gl_6687447 | Donatia sp. Morgan 2142 |
| 1984 | gl_15792017 | Campylobacter jejuni subsp. jejuni NCTC 11168 |
| 1985 | gl_6687485 | Eucnide bartonioides |
| 1986 | gl_23040075 | Trichodesmium erythraeum IMS101 |
| 1987 | gl_29420857 | Saccharomyces castellii |
| 1988 | gl_30063190 | Shigella flexneri 2a str. 2457T |
| 1989 | MRT4530_8337P.2 | Oryza sativa |
| 1990 | gl_15924363 | Staphylococcus aureus subsp. aureus Mu50 |
| 1991 | gl_14591712 | Pyrococcus horikoshii |
| 1992 | gl_15422204 | Acicarpha tribuloides |
| 1993 | gl_22956679 | Rhodobacter sphaeroides |
| 1994 | gl_21241839 | Xanthomonas axonopodis pv. citri str. 306 |
| 1995 | gl_7708157 | Asparagus officinalis |
| 1996 | gl_28493446 | Tropheryma whipplei str. Twist |
| 1997 | gl_15608755 | Mycobacterium tuberculosis H37Rv |
| 1998 | gl_19033053 | Lamprothamnium macropogon |
| 1999 | gl_15921495 | Sulfolobus tokodaii |
| 2000 | gl_32405352 | Neurospora crassa |
| 2001 | gl_5758898 | Monocostus uniflorus |
| 2002 | gl_23004962 | Magnetospirillum magnetotacticum |
| 2003 | gl_30102526 | Arabidopsis thaliana |
| 2004 | gl_28210965 | Clostridium tetani E88 |
| 2005 | gl_20808232 | Thermoanaerobacter tengcongensis |
| 2006 | gl_7706835 | Acorus calamus |
| 2007 | gl_23501390 | Brucella suis 1330 |
| 2008 | gl_15605055 | Chlamydia trachomatis |
| 2009 | gl_5231205 | Streptococcus pneumoniae |
| 2010 | gl_27526581 | Kluyveromyces thermotolerans |
| 2011 | gl_3850984 | Opisthiolepis heterophylla |
| 2012 | MRT3847_53988P.3 | Glycine max |
| 2013 | gl_7708497 | Metrosideros nervulosa |
| 2014 | MRT3847_161472P.3 | Glycine max |
| 2015 | gl_169779 | Oryza sativa |
| 2016 | gl_3122320 | Mycobacterium intracellulare |
| 2017 | MRT3847_249176P.2 | Glycine max |
| 2018 | gl_15239624 | Arabidopsis thaliana |
| 2019 | gl_14718090 | Ixonanthes icosandra |
| 2020 | gl_25956266 | Lotus japonicus |
| 2021 | gl_5758897 | Mayaca aubletii |
| 2022 | gl_29376200 | Enterococcus faecalis V583 |
| 2023 | gl_32029713 | Haemophilus somnus 2336 |
| 2024 | gl_15608450 | Mycobacterium tuberculosis H37Rv |
| 2025 | gl_3850908 | Symphionema montanum |
| 2026 | gl_29420837 | Saccharomyces cerevisiae |
| 2027 | gl_12004165 | Soldanella montana |
| 2028 | gl_27883932 | Lycopersicon esculentum |
| 2029 | gl_15900780 | Streptococcus pneumoniae TIGR4 |
| 2030 | gl_15232517 | Arabidopsis thaliana |
| 2031 | gl_13235340 | Mesembryanthemum crystallinum |
| 2032 | gl_7708646 | Sloanea berteriana |
| 2033 | gl_29833453 | Streptomyces avermitilis MA-4680 |
| 2034 | gl_14717920 | Abatia parviflora |
| 2035 | gl_608671 | Arabidopsis thaliana |
| 2036 | gl_15615725 | Bacillus halodurans |
| 2037 | gl_23021827 | Clostridium thermocellum ATCC 27405 |
| 2038 | gl_98485 | Bacillus subtilis |
| 2039 | gl_7688039 | Schisandra sphenanthera |
| 2040 | MRT3847_7845P.3 | Glycine max |
| 2041 | MRT3847_51771P.3 | Glycine max |
| 2042 | gl_23502956 | Brucella suis 1330 |
| 2043 | gl_5758896 | Marantochloa atropurpurea |
| 2044 | gl_20330751 | Oryza sativa (japonica cultivar-group) |
| 2045 | gl_3850950 | Musgravea heterophylla |
| 2046 | gl_7442732 | Solanum tuberosum |
| 2047 | gl_15676021 | Neisseria meningltidis MC58 |
| 2048 | gl_4206578 | Severinia buxifolia |
| 2049 | MRT4565_28703P.3 | Triticum aestivum |
| 2050 | gl_15843516 | Mycobacterium tuberculosis CDC1551 |
| 2051 | gl_4995767 | Pterospermum celebicum |
| 2052 | gl_22976982 | Ralstonia metallidurans |
| 2053 | gl_11467696 | Guillardia theta |
| 2054 | gl_21633405 | Dipteropeltis poranoides |
| 2055 | gl_6599365 | Pistacia vera |
| 2056 | gl_30267056 | Ipomoea littoralis |
| 2057 | gl_16225426 | Castanea sativa |
| 2058 | gl_15594440 | Borrelia burgdorferi B31 |
| 2059 | MRT3847_28679P.3 | Glycine max |
| 2060 | gl_3041863 | Bacillus subtilis |
| 2061 | MRT4530_10024P.1 | Oryza sativa |
| 2062 | MRT4565_71415P.2 | Triticum aestivum |
| 2063 | gl_14718136 | Mollugo verticillata |
| 2064 | gl_5231196 | Streptococcus pneumoniae |
| 2065 | gl_14718060 | Galphimia gracilis |
| 2066 | gl_16079320 | Bacillus subtilis subsp. subtilis str. 168 |
| 2067 | MRT4565_30002P.3 | Triticum aestivum |
| 2068 | gl_1296452 | Bacillus subtilis |
| 2069 | gl_20136067 | Shigella sonnei |
| 2070 | gl_22992679 | Enterococcus faecium |
| 2071 | MRT3847_239538P.2 | Glycine max |
| 2072 | gl_23473439 | Desulfovibrio desulfuricans G20 |
| 2073 | gl_24940256 | Patagonula americana |
| 2074 | gl_22775591 | Cryptococcus neoformans var. neoformans |
| 2075 | gl_22996222 | Xylella fastidiosa Ann-1 |
| 2076 | gl_22653795 | Mesorhizobium loti |
| 2077 | gl_15982954 | Prunus persica |
| 2078 | gl_6970415 | Rosa rugosa |
| 2079 | gl_32441494 | Auricularia auricula-judae |
| 2080 | gl_15790973 | Halobacterium sp. NRC-1 |
| 2081 | gl_9955873 | Asperglllus oryzae |
| 2082 | gl_478405 | Secale cereale |
| 2083 | gl_23115534 | Desulfitobacterium hafniense |
| 2084 | MRT4565_20121P.3 | Triticum aestivum |
| 2085 | gl_227786 | Sorghum bicolor |
| 2086 | gl_15601464 | Vibrio cholerae |
| 2087 | gl_21633399 | Itzaea sericea |
| 2088 | gl_14600753 | Aeropyrum pernix |
| 2089 | gl_1170699 | Yarrowia lipolytica |
| 2090 | gl_28378350 | Lactobacillus plantarum WCFS1 |
| 2091 | MRT3847_53989P.3 | Glycine max |
| 2092 | gl_20136015 | Shigella boydii |
| 2093 | gl_15827659 | Mycobacterium leprae |
| 2094 | MRT3847_241638P.2 | Glycine max |
| 2095 | gl_28564203 | Saccharomyces castellii |
| 2096 | gl_32423711 | primary endosymbiont of Bemisia tabaci |
| 2097 | gl_12004119 | Diospyros digyna |
| 2098 | gl_23428880 | Lycopersicon esculentum |
| 2099 | gl_8134368 | Myxococcus xanthus |
| 2100 | gl_21401812 | Bacillus anthracis str. A2012 |
| 2101 | gl_2981133 | Populus balsamifera subsp. trichocarpa |
| 2102 | MRT3847_249177P.2 | Glycine max |
| 2103 | MRT3847_250748P.2 | Glycine max |
| 2104 | gl_28564230 | Saccharomyces castellii |
| 2105 | gl_7708171 | Borago officinalis |
| 2106 | gl_25402689 | Arabidopsis thaliana |
| 2107 | gl_22988101 | Burkholderia fungorum |
| 2108 | gl_100285 | Nicotiana sp. |
| 2109 | gl_4995852 | Trochetiopsis erythroxylon |
| 2110 | gl_25005270 | Lactobacillus delbrueckii subsp. lactis |
| 2111 | gl_21219937 | Streptomyces coelicolor A3(2) |
| 2112 | gl_24940182 | Ehretia cymosa |
| 2113 | MRT3847_43842P.3 | Glycine max |
| 2114 | gl_15897484 | Sulfolobus solfataricus |
| 2115 | MRT4530_54700P.1 | Oryza sativa |
| 2116 | gl_5231181 | Streptococcus pneumoniae |
| 2117 | gl_25307910 | Arabidopsis thaliana |
| 2118 | MRT4530_118075P.1 | Oryza sativa |
| 2119 | gl_4995107 | Eriolaena spectabilis |
| 2120 | gl_7452981 | Hordeum vulgare subsp. vulgare |
| 2121 | gl_585371 | Geobacillus stearothermophilus |
| 2122 | gl_26247590 | Escherichia coli CFT073 |
| 2123 | gl_399096 | Brassica napus |
| 2124 | gl_4164408 | Ricinus communis |
| 2125 | gl_32034348 | Actinobacillus pleuropneumoniae serovar 1 str. 4074 |
| 2126 | gl_20092951 | Methanosarcina acetivorans C2A |
| 2127 | MRT4565_14604P.1 | Triticum aestivum |
| 2128 | MRT3847_7846P.2 | Glycine max |
| 2129 | gl_21633365 | Evolvulus glomeratus |
| 2130 | gl_29420863 | Saccharomyces exiguus |
| 2131 | gl_6688706 | Montinia caryophyllacea |
| 2132 | gl_21633301 | Merremia aegyptia |
| 2133 | gl_23023764 | Leuconostoc mesenteroides subsp. mesenteroides ATCC 8293 |
| 2134 | gl_7708306 | Fuchsia procumbens |
| 2135 | gl_8452779 | Staphylea trifolia |
| 2136 | gl_4995790 | Reevesia thyrsoidea |
| 2137 | gl_15242347 | Arabidopsis thaliana |
| 2138 | gl_30684104 | Arabidopsis thaliana |
| 2139 | gl_20136069 | Shigella sonnei |
| 2140 | gl_5758867 | Costus malortieanus |
| 2141 | gl_16129221 | Escherichia coli K12 |
| 2142 | gl_3023975 | Borrelia burgdorferi |
| 2143 | MRT4565_118744P.1 | Triticum aestivum |
| 2144 | gl_15220923 | Arabidopsis thaliana |
| 2145 | MRT4530_91129P.1 | Oryza sativa |
| 2146 | gl_27372782 | Populus tremuloides |
| 2147 | gl_23122758 | Prochlorococcus marinus subsp. pastoris str. CCMP1378 |
| 2148 | gl_169777 | Oryza sativa |
| 2149 | gl_4063528 | Berrya javanica |
| 2150 | gl_32483423 | Oryza sativa (japonica cultivar-group) |
| 2151 | gl_9663979 | Oryza sativa (japonica cultivar-group) |
| 2152 | gl_21633437 | Porana paniculata |
| 2153 | gl_4995846 | Theobroma cacao |
| 2154 | gl_19033055 | Lychnothamnus barbatus |
| 2155 | gl_20218805 | Pinus pinaster |
| 2156 | gl_20805967 | Chlamydia trachomatis |
| 2157 | gl_28378504 | Lactobacillus plantarum WCFS1 |
| 2158 | gl_15591909 | Arabidopsis thaliana |
| 2159 | gl_15241190 | Arabidopsis thaliana |
| 2160 | gl_3850906 | Agastachys odorata |
| 2161 | gl_775193 | Escherichia coli |
| 2162 | gl_17227820 | Nostoc sp. PCC 7120 |
| 2163 | gl_16765071 | Salmonella typhimurium LT2 |
| 2164 | gl_420929 | Ralstonia eutropha |
| 2165 | gl_5758866 | Costus barbatus |
| 2166 | gl_7708572 | Rhabdodendron amazonicum |
| 2167 | gl_4063570 | Tropaeolum tricolor |
| 2168 | gl_18311131 | Clostridium perfringens str. 13 |
| 2169 | MRT3847_272006P.1 | Glycine max |
| 2170 | gl_17224922 | Brassica napus |
| 2171 | MRT3847_30433P.3 | Glycine max |
| 2172 | gl_7488932 | Daucus carota |
| 2173 | gl_15612263 | Helicobacter pylori J99 |
| 2174 | gl_25297689 | Arabidopsis thaliana |
| 2175 | gl_20136099 | Escherichia coli |
| 2176 | gl_15791759 | Campylobacter jejuni subsp. jejuni NCTC 11168 |
| 2177 | gl_29420843 | Saccharomyces cerevisiae |
| 2178 | gl_231541 | Glycine max |
| 2179 | gl_20136035 | Shigella flexneri |
| 2180 | gl_6016881 | Bacillus sp. |
| 2181 | gl_7708628 | Saintpaulia ionantha |
| 2182 | MRT3847_254592P.2 | Glycine max |
| 2183 | gl_12004167 | Theophrasta americana |
| 2184 | MRT4565_98303P.2 | Triticum aestivum |
| 2185 | gl_15896652 | Clostridium acetobutylicum |
| 2186 | gl_20269410 | Eurya sp. Chung & Anderberg 1406 |
| 2187 | gl_23021813 | Clostridium thermocellum ATCC 27405 |
| 2188 | gl_7708570 | Reinwardtia indica |
| 2189 | gl_4063558 | Pelargonium cotyledonis |
| 2190 | gl_6324844 | Saccharomyces cerevisiae |
| 2191 | gl_13812343 | Guillardia theta |
| 2192 | gl_24940198 | Lobostemon fruticosus |
| 2193 | gl_7708197 | Coffea arabica |
| 2194 | gl_27528474 | Saccharomyces dairenensis |
| 2195 | gl_28898735 | Vibrio parahaemolyticus RIMD 2210633 |
| 2196 | gl_5881832 | Gluconobacter oxydans |
| 2197 | CGPG25.pep | Arabidopsis thaliana |
| 2198 | gl_30267054 | Ipomoea ramosissima |
| 2199 | gl_14718167 | Pelliciera rhizophorae |
| 2200 | gl_11467655 | Guillardia theta |
| 2201 | MRT3847_99459P.3 | Glycine max |
| 2202 | MRT4565_90833P.2 | Triticum aestivum |
| 2203 | MRT3847_36085P.3 | Glycine max |
| 2204 | gl_18075919 | Forgesia racemosa |
| 2205 | gl_8452620 | Bulbine succulenta |
| 2206 | gl_2245390 | Arabidopsis thaliana |
| 2207 | gl_6323699 | Saccharomyces cerevisiae |
| 2208 | gl_30688566 | Arabidopsis thaliana |
| 2209 | gl_15895897 | Clostridium acetobutylicum |
| 2210 | gl_4995059 | Byttneria filipes |
| 2211 | gl_4033725 | Picea mariana |
| 2212 | gl_24430421 | Nicotiana sylvestris |
| 2213 | MRT4530_37730P.2 | Oryza sativa |
| 2214 | gl_16554463 | Halobacterium sp. NRC-1 |
| 2215 | gl_28380215 | Buchnera aphidicola (Melaphis rhois) |
| 2216 | gl_6687278 | Cephalanthus occidentalis |
| 2217 | gl_7677378 | Lycopersicon esculentum |
| 2218 | gl_5031217 | Liquidambar styraciflua |
| 2219 | gl_32477628 | Pirellula sp. |
| 2220 | gl_27529826 | Nicotiana tabacum |
| 2221 | gl_22965894 | Rhodospirillum rubrum |
| 2222 | gl_20136065 | Shigella sonnei |
| 2223 | gl_11322499 | Hordeum vulgare |
| 2224 | gl_14717980 | Cajophora acuminata |
| 2225 | gl_1934688 | Tmesipteris tannensis |
| 2226 | gl_12655961 | Brassica rapa |
| 2227 | gl_5001583 | Cercidiphyllum japonicum |
| 2228 | MRT4565_43218P.3 | Triticum aestivum |
| 2229 | gl_23037947 | Oenococcus oeni MCW |
| 2230 | gl_23113700 | Desulfitobacterium hafniense |
| 2231 | gl_101735 | Yarrowia lipolytica |
| 2232 | gl_21282989 | Staphylococcus aureus subsp. aureus MW2 |
| 2233 | gl_23110381 | Novosphingobium aromaticivorans |
| 2234 | gl_15838086 | Xylella fastidiosa 9a5c |
| 2235 | gl_21633457 | Cuscuta japonica |
| 2236 | MRT4565_14593P.3 | Triticum aestivum |
| 2237 | gl_23336674 | Bifidobacterium longum DJO10A |
| 2238 | gl_16943745 | Polygonatum hookeri |
| 2239 | gl_24379020 | Streptococcus mutans UA159 |
| 2240 | gl_21684893 | Flagellaria indica |
| 2241 | gl_24940262 | Saccellium lanceolatum |
| 2242 | gl_14718046 | Eucryphia lucida |
| 2243 | MRT4530_57792P.1 | Oryza sativa |
| 2244 | MRT4565_36882P.3 | Triticum aestivum |
| 2245 | gl_28564264 | Saccharomyces castellii |
| 2246 | gl_21633397 | Bonamia media |
| 2247 | gl_7446527 | Arabidopsis thaliana |
| 2248 | gl_7708139 | Aextoxicon punctatum |
| 2249 | gl_9294047 | Arabidopsis thaliana |
| 2250 | gl_30060377 | Oryza sativa (japonica cultivar-group) |
| 2251 | gl_13518304 | Oenothera elata subsp. hookeri |
| 2252 | gl_421428 | Lactococcus lactis subsp. lactis |
| 2253 | gl_20136013 | Shigella boydii |
| 2254 | gl_15668279 | Methanocaldococcus jannaschii |
| 2255 | MRT4530_21629P.1 | Oryza sativa |
| 2256 | gl_7708642 | Schima superba |
| 2257 | gl_15641182 | Vibrio cholerae |
| 2258 | gl_6017792 | Haloragls erecta |
| 2259 | gl_6539568 | Oryza sativa (japonica cultivar-group) |
| 2260 | gl_15594957 | Borrelia burgdorferi B31 |
| 2261 | gl_6687120 | Cajophora acuminata |
| 2262 | gl_5834523 | Cichorium intybus x Cichorium endivia |
| 2263 | MRT3847_2805P.3 | Glycine max |
| 2264 | gl_2981131 | Populus balsamifera subsp. trichocarpa |
| 2265 | gl_19033087 | Mougeotia sp. UTEX LB 758 |
| 2266 | gl_2105144 | Treponema denticola |
| 2267 | gl_14718013 | Cneorum pulverulentum |
| 2268 | gl_6708108 | Streptococcus thermophilus |
| 2269 | gl_6689008 | Philadelphus lewisii |
| 2270 | gl_20467373 | Ephedra intermedia |
| 2271 | gl_23019058 | Thermobifida fusca |
| 2272 | gl_7708296 | Ercilla volubilis |
| 2273 | gl_21684923 | Xyris involucrata |
| 2274 | gl_23133806 | Synechococcus sp. WH 8102 |
| 2275 | gl_28198387 | Xylella fastidiosa Temecula1 |
| 2276 | gl_7708616 | Rheum pinchonii |
| 2277 | gl_5758903 | Ornithogalum caudatum |
| 2278 | MRT4565_58256P.2 | Triticum aestivum |
| 2279 | gl_28380214 | Vibrio metschnikovii |
| 2280 | gl_28262700 | Rickettsia sibirica |
| 2281 | gl_22962442 | Rhodopseudomonas palustris |
| 2282 | gl_15233656 | Arabidopsis thaliana |
| 2283 | gl_30351917 | Polyxena ensifolia |
| 2284 | gl_23121268 | Desulfitobacterium hafniense |
| 2285 | MRT4530_114918P.2 | Oryza sativa |
| 2286 | gl_7708460 | Kedrostis nana |
| 2287 | gl_15673133 | Lactococcus lactis subsp. lactis |
| 2288 | gl_7488483 | Brassica napus |
| 2289 | gl_4995177 | Grewia occidentalis |
| 2290 | gl_1272340 | Capsicum annuum |
| 2291 | gl_12322049 | Arabidopsis thaliana |
| 2292 | gl_27528490 | Saccharomyces bayanus |
| 2293 | gl_1655938 | Vibrio parahaemolyticus |
| 2294 | gl_17549667 | Ralstonia solanacearum |
| 2295 | gl_15236196 | Arabidopsis thaliana |
| 2296 | gl_20136103 | Escherichia fergusonii |
| 2297 | gl_14718076 | Humulus lupulus |
| 2298 | gl_4218162 | Gerbera hybrid cv. [Terra Reglna] |
| 2299 | gl_7708662 | Strychnos nux-vomica |
| 2300 | gl_25029429 | Corynebacterium efficiens YS-314 |
| 2301 | gl_5305260 | Brassica rapa |
| 2302 | gl_3913225 | Cyanidium caldarium |
| 2303 | gl_6689113 | Roglera suffrutescens |
| 2304 | gl_3850980 | Lomatia myricoides |
| 2305 | gl_22999862 | Magnetococcus sp. MC-1 |
| 2306 | gl_21230440 | Xanthomonas campestris pv. campestris str. ATCC 33913 |
| 2307 | gl_18309257 | Clostridium perfringens str. 13 |
| 2308 | gl_13357744 | Ureaplasma urealyticum |
| 2309 | gl_27262354 | Heliobacillus mobilis |
| 2310 | gl_7708333 | Humiria balsamifera |
| 2311 | gl_29376445 | Enterococcus faecalis V583 |
| 2312 | gl_4063526 | Ailanthus altissima |
| 2313 | gl_15835226 | Chlamydia muridarum |
| 2314 | gl_28192488 | Streptomyces carzinostaticus subsp. neocarzinostaticus |
| 2315 | gl_21633435 | Cordisepalum phalanthopetalum |
| 2316 | gl_114516 | Halobacterium salinarum |
| 2317 | gl_32412440 | Neurospora crassa |
| 2318 | gl_7708674 | Tetracera asiatica |
| 2319 | gl_16549078 | Magnolia praecocissima |
| 2320 | gl_30265987 | Coleochaete sp. 489a1 |
| 2321 | gl_23465609 | Bifidobacterium longum NCC2705 |
| 2322 | gl_6175246 | Lycopersicon esculentum |
| 2323 | gl_18650789 | Phalaenopsis equestris |
| 2324 | MRT4565_16821P.3 | Triticum aestivum |
| 2325 | gl_18075921 | Escallonia calcottiae |
| 2326 | gl_23112455 | Desulfitobacterium hafniense |
| 2327 | MRT3847_64872P.3 | Glycine max |
| 2328 | gl_22297982 | Thermosynechococcus elongatus BP-1 |
| 2329 | gl_13366140 | Hordeum vulgare subsp. vulgare |
| 2330 | gl_19033057 | Nitellopsis obtusa |
| 2331 | gl_4206610 | Trichilia emetica |
| 2332 | gl_24374035 | Shewanella oneidensis MR-1 |
| 2333 | gl_15216030 | Vicia faba var. minor |
| 2334 | gl_20136097 | Escherichia coli |
| 2335 | gl_20136033 | Shigella flexneri |
| 2336 | gl_5001569 | Hedera helix |
| 2337 | gl_11260405 | Schizosaccharomyces pombe |

What is claimed is:

1-4. (canceled)

5. Hybrid maize seed which is produced by crossing two parental maize lines where at least one of said parental maize lines is a transgenic maize line which has in its genome a recombinant DNA construct comprising at least one oil-associated gene operably linked to a promoter which is functional in said plant to transcribe said oil-associated gene.

6-9. (canceled)

10. A method of breeding maize comprising selecting from a breeding population of maize plants a selected maize plant with higher oil than other maize plants in said breeding population based on allelic polymorphisms associated by linkage disequilibrium to a higher seed oil-related trait, wherein the selected maize plant has 1 or more higher oil alleles linked to a maize oil marker.

11. (canceled)

12. A method of breeding maize according to claim 10 wherein said selected maize plant has 2 or more higher oil alleles linked to a maize oil marker.

13. A method of breeding maize according to claim 10 wherein said selected maize plant has 3 or more higher oil alleles linked to a maize oil marker.

14-20. (canceled)

21. A method of associating a seed oil-related trait to a genotype in maize comprising
(a) identifying a set of one or more seed oil level traits characterizing said maize plants,
(b) selecting tissue from at least two maize plants having allelic DNA and assaying DNA or mRNA from said tissue to identify the presence or absence of a set of distinct polymorphisms comprising at least one polymorphism linked to a polymorphic maize DNA locus which comprises at least 20 consecutive nucleotides which include or are adjacent to a maize oil marker, and
(c) identifying associations between said set of polymorphisms and said set of traits.

The application's sequence listing, which the Patent Office published only in electronic form, follows.

SEQUENCE LISTING (2337 sequences)

SEQ ID NO: 1 - DNA, 330 bp, Zea mays
  unsure (1)..(330): unsure at all n locations
cccttcctcaaatgtcataaatcgatcaccggaatgacacgcggaacgaattatagaatcttgctatgttatgcttgcacaacaaatcaataaaactcaaacgatggcgcgcaccagannnnnnngcagcgctacagtagccgcagcacaaacagcaatagaaattgctacagtgcttattagataacattacttgcagcagctctgatgttccaccaaaaaanaagttgaggatatanagaactaaacaggctcaccgatctgaaattaccactctaaagcgcacgggatccatccaagagtataattgcctcgtcagaaggttcccaa

SEQ ID NO: 2 - DNA, 1448 bp, Zea mays
ggatcctctatagtcgtcctgcagctgcacacatactagccttgtgaatgatgggcggcggtattttcataacatgactcatgtatacagtataagccctaggattgagcattatggttgtatggttgacctgttgagtcgtgcgggattgctggaggaggctcatcagctgattggtgacatgccaatgctggcaaatgccgttgtatggggagcacgcctcggtggttgcaagatccatcggaatgctgaccttgctgaatatgtgctgaagcagctcatccgactggagccatggaattctgggaactatgtcatgctttctaacatttactcgaacagtggaagatgggaagatgctgcaaagcttatgttggaaatgaaggcaaaggggattgagaaggtcgctgcctctagctgggttgagcttgatgataaggtccacaagttctatgttggggacgattcacatcctctttcagataagatctatgcaaagcttgatgaattgggccacggcataccttgtagattgagcccatagcagcccatatttgaagaaaaaacaaaagaaaaagagcccaacacgtaacaagcaacatctcgcattgattttgaagcgtgagaatctggtctgcttattctgttcgctgtgtttttttcgttccactcagcttttcgcagccgccgttttacgttagccaattctgctgtcagcttgccgctgtccgctcgtcctttgagctttggtaggtactaacttgaatactagatgcatgcttctttgattcaccaccatttatcatcagaatgtcataatattgtaggtccaaattatcgtctctagtagaacaacgccggtaaattatgtcaatcatgcaacaaccgccgtgcttactattttttttactttaagtatatataatcttaggaaatactgttgtcctaccatgaatagcgctctggtgactagctaaacatgctattagaatataataaataatatatcgatctactatatctatatgtgtgcaatctgttttatatatattttagattacatatatttaaactatacttatattgtattctgtgctggtttgtcaggttgtgtctcccaaatatcttgcctttttgttgcattggactcttctgtggttagaatggcagcacccaagcccatttctcgtcttatttctcacgtcattcttgatttggatggcaccctcttaaacacaggtgacttaaaacttggaaacaactatgattaatggttttttgaggtttagtgtactgaattcacctatctgagctgacttcgattctcttgtcgactctatgtggcagattctgttgtaagtaaggtagtaaaaccatttattctaaagaatggaaaaacgtgggatagcaagaaagctcacaagctagttgggaagacaccttatgaa

SEQ ID NO: 3 - DNA, 768 bp, Zea mays
  unsure (1)..(768): unsure at all n locations
gcataaacggctcatgaacggctcatgaaacaaagtctacatggttcagaacccagatctggcccaaaagaacccaaatcagaattggcaggggccaggcgccggaactgtagacttcataaatcaggaacccagatatgggaaaaagttttaaaattacatgatttttgtaacaaagtacagactatatggatcagaaaccctgatctggatcaagaagcagcaaaccgagatctgaactgatcaagaagcagcaaaccgagacctgaactgcgtcgcgtaccccatctaccacaaattatgacgtccactctcccacttggggagatggtaagccaacgcatccaccaagtgcaatgtgggccattgatctaggccacgggccttcttgatagccagtcgaccccgtccaggtaagtatgttgcaaagtaggcaggggcactgcttatgtagcctcctcacgcgtcgcacccatcttcaggcggcgaggtgggactaaccgaaacgtgcctcacccagtcaccctgtcgctcgagcgctggaagtgggcgagcgctcgttattttgcagagcccataaacgaaagcccatgaaatcttccgactcgtgcgcgccaaccttttttgtgctcgctcaccgaccggcgccatcactcgctgaaatttcttttcccaatccagttcattctgccgctctccaatagtccaatccggtcgcggcgaagctcggncagacgggcaccccaatgccgtcacggtcgggctccc

SEQ ID NO: 4 - DNA, 746 bp, Zea mays
aagtcataccttgctatttgagaattgaactattcgcctagatgtgggaagaaaatgagatactcttgttccagttccagatccagtatcatcaactttctgaccatgtccactactgaactgcctttgtagtgacgagtggttatgtgcatcagatgatctctctctaacacaaagaagcatccgtcctatcatgtagcaatacccgatcagcatgagaaatgacaaattcactgtccccaagtgttgttctaaactagaaatgggtactacaacataagctttatactgcatgcagtctcggaaaaaaaaacaatagtggaatgcccatcccttaaacatttactaatataacacttggttcacaatcatggtttttaaagcggcaaggcggtccaaggcgttggaccaccgcctggacacctaggcggcgcctaggcgaggtaggcgggcaaggcgcctaggcgttagaccaccgtccggacgcctaggcgacgccttaagaacagtgttcacaatgattttcaaatgagcaaatcagctgaggaaatcttctgaacagtacagtgacaaaagaagtttttggtagacctaaagtcaattgcaacatcaaaggacagctatgataattcaataaacaatagctagcaacggagaactagtacctaaataatccccatttcataattcaatatgatcatcagcgaagcaaactttaaatttcaaaaactgaaaggaaaaactaa

SEQ ID NO: 5 - DNA, 611 bp, Zea mays
aggctccggagaaggtgacgtgggtgagggccttctacgacgacttgggcgccttcaccagggaccaggagctgctggtgtcgattccggattcggtggactacgtggaagggttcatggtcctgaacgagcggtccctccacagctcctccatcgccttccccgcgagcgtggacttcagcccggatttcggcaccaggagcagccctaggatctactactgcgtcgagttcgcggtgcaccaccaccacggttaccagaagcagtctcaggcggccgtggaggccatctcgaggcggatgagccacatggcgtcccagctgtacagcgtggaggtgtcctacttggacttcctgaaccgggtcaggatggaggaggtgagcctgcggagcgccgggatgtgggaggaggtgcaccacccgtggctcaacatgttcgtgcccaagcccggggtcgctggctttagggatctgctcatggacaacgtctcgccggatagctttcagggcctcattctcatctacccactcctcagagacaagtaagtaccactcttctaataataataattatgatgacacaaaagctatgtagtagtacatccatgaaat

SEQ ID NO: 6 - DNA, 702 bp, Zea mays
gagcattcgagctctgttgcggcagtgtccatctgcttgaatgtatcttggacctgtgaccacagttttccagcccgtatctaataaaaagcaaacagaaggttagtgaaacataagcactctgataacatgctattgaattgtcaacaattttgtttcaatgaataagggagcaaattcggtcaggaaaacagcaagagctaacaatactagtttgcagcagccagtggcagacctaggattttacaggagggcatgccatgcattttgataaacttgtttagcgattcggtttcaaggctctcttgggaatgatcttgatcaggttgaaagcatgctctgcaattggttatccaaaaagccagtgagaaagtttcattaccaactgtggtttgtacagcaacaccaacaacgtttgggcaatataagggccttgcactggtaaacctgcccaaacatgttcctcatcaatcttccgtgcccacagccatctgatacggagtgaccagccgaaagtttcaaggttatgaatgcctagctccccaaactgaatagggaattgaaccttttcgcacgagactagacagttaccccaaagaaacctgtcttttcttatcaataacttgtaacactcattttgataaatccatggcaaccacaagataaaacaggatagcatggagcaccgcccttagtttgggg

SEQ ID NO: 7 - DNA, 798 bp, Zea mays
atcttgcatgcctgcagaaacgttggcaaaatgtaaaaaaatccgctacagctggttttctataggtcacatgtaaggttactaacgtcaaccttaaaacaatttgctgctccactgaatgtgcaactgtgcatggcgatactaataactatacagcaatcaaatcataaagaaagagaaaaacttggacgaacctcaagtgctttgcagactttatcgacctcgcaggcatagtttatcttctttgatgtcattataagttcaacaacagcgatacacgagtgagcggaaggatcaaaaacaggcagagcgactgtaccatggacgttgtagctgatcgcatggttaagtcgttggtactcaccactgctatagtactgcacattcggtgtccactcgggcaccttttgcttatagacacgcccaggtaggcccaggtctccaacattttccgcatcaactgaaaacatgtaggtcatggatacagccctgtactgaagtaggccaatgctctggtggtcaagcacgaaaggctgtcctgaagtagtgagcacatagcggtctccattcttgactggtgcccagacttggaccagcagatgttgatcggtggactccttgaagtagcgaagagcgtgtgtcagcttctccttgaacaagctggagttgactgtgccatcttcgtccagggacagatgaaactgccatctgtgactgatctgttcagctggcttgcttgaagtgtgagaattccctgggtgaaagaagcaagattgtaaggcgaggaacgggatgctg

SEQ ID NO: 8 - DNA, 771 bp, Zea mays
ttttgtcccggcattcatatgcagatttgccaaatatatggaatggaactgagaagaactcattgtatataaggccacagtatattgagaatattgccatcagaagaataacatatcgtccgccgaatgccaactccataaagctaccaagcttctgaaataagttatgaaccgaaggttacaggaagagattaagtgtgcttgcgcaaacactgtgaaataaatagcaagatgcaaagttcgaattaaggctcctgaaacagacaagcatcactggaagagattacgtgtgtttgtgtacacactgaaataatggcaagaagcaaagttcaaattaaggctcctgaaacagacaagcatcactggagccaaaggggccataaaaaactcttcagtgggtttcctgcatgcttatgtgttttactggattccatttgcattacaggactgattttctgaacttgtgtgtaatcggttatctgccatatttctaaacaggtcctgtgatataacaggttccttttttgcctctgactctatcagaatgaagtataatacgctcaaaaaagattaggagtagattgtttaagaatattctttaggcgctaaaattcctttgtgatatttaatacagtataacataatacatatacatgatttgtttctaatggttaattggttatggtaaagaaagaaagaaaaggaataaagttcagcatcatttacctgagaggaaaatctcttctcgcgaaatataagaaccaaagctct

SEQ ID NO: 9 - DNA, 768 bp, Zea mays
tcccgtatagtcgacctgcaggctcattacaacatagcaagtatgtttgggaatcagaccatggcatgcatgtatgtttgggaattagaacattgtgtacatcatttggaatcatcagcaggaaaaaaagaagaaaaagtaaatgtactgcatgattagagtgataaaaagcaaggaattctccctcccgtgaaaaatagttgtcacatttgtctttgcacggttttgatattttctttcaccaccaatttcttctagaacatattctaaaaattcttgaaatcacgagattttgcaagtattttcaaacaaaaatctagacatatattaacatgtttctaaaccagataaatttgatattgatgtttgtaattttcaagttttcaccagatattatcctaaaacaacatgtatctatgaccaggagtcttttatttattcagagatagtcctaacttgtattttattttctcataaaaataacaaaaacggatgttgctttatttgcaagtagtaaactgaagagcaagtttgactgttaatttgattgaaaatattaatataaaatcacaaatgtcaagccttgcttgatatgaaaagatcaagcaataacgccatctcgtgaaaatttaaatatatagaaaaataaccaagcaattaaagctgcaagtaatacttaatctcctacattaaccgcataatttataactgctctacctggggttgtgccagcatagattccatacccaacatcatctgtgatgaaag

SEQ ID NO: 10 - DNA, 820 bp, Zea mays
ttgcatgcctgcagctctattttgcaagtcgttactgacaacttgtaacaaattgttgtatttacgggcatttttaccatcaaatacaatacaaaaccgcatctttttttttgccattgttgtatttaccatcaaatatgatattaaactgttgtatttacaagcattgttactagtcatagtattccactatgtactcatgccaatttcagtgctaggacttctagcaacttttcctgactacatgttctaattctgtttccggtttatctgcaacaggttgttgaccttgctgagattgattgcaatcatcctattcttcatatggcgtatccggcatccgcatgccgacggaatgtggctctggtggatatccattgtcggagatttctggtttggtgtcacttggttgctaaaccaagttgcgaagctcaaccctaccaagcgtgtcccagacctttccctcttgagacaacagttcgatctccctgatggcaactctaatctccctaggcttgatgtttttatcaacaccgtcgatcccataaacgagcctatgatatacaccatgaactctatcctgtccattcttgccgtagactacccaatcgataggactgctacctacctctcggatgatggagggtccataatccattacgagggcttgcttgagacagcaaatttcgcgacactctgggttccattttgccgaaaacatagcattgagccgagagcccctgagagctattttgctgtgaagtcgcgcccatacactggaaatgtaccagatgagtttgctgatgatcatagacgcatg

SEQ ID NO: 11 - DNA, 775 bp, Zea mays
tctttatcttatataagcatttcattttgaaatgatccatttcccaatgccgaggcacatgcaaactgttttaacttttatgccttacacggttgttttcagacattatgtgctgtacctatttcaggcaatttcaagacgagccaccttatacaagatgataagggattatgaccaagctgctaatgatgtaaggaagctaatctctcttcttgaaaagaaagtcaatgtgtctggagtatcaccaaaagcttttaacaagcacaatgatctcaagcaagcacatgtgaggctttcatccatagaggatgaagcaaaaaatgacacccccctgaatttgtatttaatcttgtaagttgtccaaattggttttacctttttgttccttcagtatgattttcttgccccagtttgtgcctggttgacctgaatatttgtattccttgaaagcaattattgcttatctctgcatttaattttcacctttcattgtagattttactgacccagacaacaaaaatagcattgtttattatatggatacaagtacaaaatatgctgtacttagtagccctttaaggaactacgctcttccatatgtgtgttgcaataacaatgggtttcacaataaatacaaagaaactggcagaaaaatataattttttggaactgtgtagagtgcttttaaacatgatattctgatataacaacatagaatatcttgcgtttgcagcaattacgactcttacttttcagtataagagtggtacctttt

SEQ ID NO: 12 - DNA, 729 bp, Zea mays
tttggaccattttgtttctttgatttagatactgaagcattactgaatatattcataagacaacgccatctgaaaacataacatggcctttgtttaaattttgattttgaccatttcatatggaatattggtttgatcacaaatacatgatcttcacataactcctctaagaatgtgatcttcatgtggaaactgctatcgccatgacttggcagagattgtcgatcttccttcagccatgcttggtgctggacagctggaagcgacaaacagaccaagttgttcatccgatgtcgaagccagaggagtttcaggaaaatcggcttatgtttatgttttattgttatgtcattggacgagtgtgtatcaggataaatgtagaaaaaaagaattttttttcttaaaatttggtcatgtactcaattatttctttgccgcaggaatatcatggagcatatgtgctcttcctggttgatggactggttctacctttactgcctctgcctgagcccccacctcatgcctggtccatctccaggagttcactgtccaccacggcatctgtgcacatggaaacgaccacctcgtgaccgatgtcttacttttacgatcaacactgcatcctcgtaccctgcctgatcaccattccttcgccaatccaaccatgccaatctcatgtctggctggagagtggagataagtgggagggttgcaccaccaattccttga

SEQ ID NO: 13 - DNA, 828 bp, Zea mays
gcagcttgggtgctgcttaaacccgtaaagcaagctacagtcacttggactcttcatcttcatatgtaggatctctgctagttctgtcgtactgaaatcatcgaaatagaagaatttcgtgacccgcctgcagaagccatcattcgaggcaatgactcgcttcattggctcgcagtacccagcaaatacgacaactatcttgccactgtccattacagacattatctcctccaaggcttctaaaccataatccttgtcatcggatttttgcattggtatcaacctgtaagcttcatccacgaagagaatacctccctctgcatcatgtatctgttgtcgtggtcacggtaacaatgtatgcgtaaggtagaacacagaatagaaataagttcagaacttgtttcgcaatttccctgaaactgaaatttgtgcagctgacggagcctttctgatgaaaagaaaagagaggattaataccttcctcctagtctttggtccagtatgccccacaaattctccaacaagatcagttcgctgaacttcagttactttgtcagtagggagaattccaaccatgtggaggagctttccaagaattcgagcaaccatagttttgcctgcaatagaggatagataatataaacagagcattgatgttttcagtaactatctacccagcacttgtgcattttactgcactgtacatgtaactgcaaaatgtataagaagcaggcagaattagaaagaatgtagccttttaaggacatgtttagccaaacttccaggtaactaatttccgttcatgatcagatcaaaagctcccaacac

SEQ ID NO: 14 - DNA, 729 bp, Zea mays
gtcgaacgagtctgtcttcagctcaggaaccacaacggacagaatcggcatggatggcctatacttggctacaagcctagcagtagttcctcccctggtcaggaccaagataagtgctgccctggcagagtttgctgtgcgaacagctgatgatgcaaggctctccaatggactcattggaattggagctgaagccatgattgatttgaaaatagcagcatggtctacgcaagactctgcttgcaggcagatcttagccatagtctgcaccgccaactctggataggccccagcagcagtctcaccactgagcataacacagtctgtgccatcaagaactgcgtttgcaacatccgttgcttctgcccgagtagggcgaggagacttgatcatagattccaacatctgggttgcagtcacaacaggcttgccttgaatattgcacttgaaaatcatcaccttctgtgcaaagaaaatcttctctataggaatttccatccctaaatcacctcttgccaccataaaagcatcagagtttgccaggatatcatcaaagttagctactccctcttgattctcaacctgcatgttcaaaactattataaccttgaatttgaaaatctactagtttgaaacccaaaagaaaatgctagaaccatacctttgacatcagcattatggacttggcatgctcaccaagtaccttcctaacctccacaagatccgaac

SEQ ID NO: 15 - DNA, 734 bp, Zea mays
aacaataacaaagagatgatgtaagtactccattacagatgaccgaaatgaggcaatatctgaattgaaatatttaagtctatatgtggtagctaaaaatagcaggaaagctcacctctgaaccatttaggttcatcccaccttgaagttctgtttgtattgattggtagcatgacatatcagcaccaaggtaatctgaaattgcaaggctataaccatctgggataccatgtagagcatcgttgtttgccggagggttcatcgagccctccatgctagaatataccatctcacctctgattgacagcagattgtattagtacacaaaaatgaatcagatttaacatatgtggccagatgccacaggggataaagaagcatgtccagtaaatattgtacccacagttaactaatgcatagattaacaagggcagatatggctgctccatattaccagtgcaccatgcagaaataactggcatggaccaataataattagattagattgaaagacactgatccatcctcaacactgctatgacagtttctaaaatcaaaatgcatgctagccagaaatctgtaacaaatctggtcaatgttcttaaggatataatttgattgccactacagcccaaagcccggaattaattcatgttccatacttccaattccagtagtagctatgaacaggtttcatgttttccttgaatgaaaataaatgtgaaaatgaatac

SEQ ID NO: 16 - DNA, 847 bp, Zea mays
ttcttgcatgcctgcagtggcgcatgcatgcgcagaagagcagccgctacaaccaatccagacgatgtcgtcgggatctagtcatctttttcttctcagtaatgcatggcgattattacgccactgttcacacctgcacacatgatcggatcgtccgaggctttctgggttcctacgtcagttggtagtatttggctagctagctagctagctagcttgtgtttgaggaaacgtaggacgtcgtcctagctaataacatctcactttctgtttcgctccctcctttctccccatatgattgatctttacctactgctgcacacacacgccttttgcttccatgcctgttctcagcagccaccgtctctgggctaggctcttgctgtttgtttaaggaatagacatggcatgtcaagtgagctgacagccttgttggccggactggactttgtgaggcagatgccctcctaacccaaacctccccagtctccactgcaactgcaactagctaggcctgagcaggtcgatgtggacagagcgagcgcgcgcgcgacagcaaaccgacgagaaagaggcgatgggtggggcttggcttgcttgtgatagggggaggattctgcctttgcgggttcctacttgtggtctggcattgcattgcattgcatgcctcctgatgccaacccttcgtgttttgggttgtgttaattcctgtcaacacctgcatgattgcgctgcggcgtacgtgtggaccatacggtgctgcttctttggcttgtaagaggtgaaggggacctgttgcttgggcaggcctagctaaccctgtccccatttcgagatcaagcgtaaa

SEQ ID NO: 17 - DNA, 752 bp, Zea mays
tgcatgcctgcagacacaccttttagtacttgaaataacatgttattgacatgaatgaagaaggcccctttacccaacaaaagactgtttggggaatttaccaagtttctgagaagatctgctgcatcatctgataactgtaaaaaatgtgcaaattattagcaacacatggtatttgtcacgatgcaatcataagttgttaaaatacaagtgaaaaaagaaaataaaaactgcaaatcatctccagtgagagttcatttacaaaattagcacatcaatgggaaaaagtctgggaaatacttgtccatggtttgaagactataataggtgtttcgtttttaaaggtaaagaagggacacaaaaaaacaaaattctgttcggaacttcagcttggtgcctccccttctacttcaacaatagtttgttcattaaattccgcccgttttggggacaccaaaactcggcaactccactgcacccattgagaaacctattttccactttgcatggtggccgctattttgattgagcaattgaagccattgtcttcccctactgccaaatgctgttagtttaagcattttaaaacagatgggaaaatattagaatttttcgattgatggtttggatataaagataaaagtgaatagagcttgaagtaaattttcattagtacaaatgacagagttctttgtagtataattaactacctattacagtcactttcgtttacacagttctctatctattgc

SEQ ID NO: 18 - DNA, 809 bp, Zea mays
gatcctctttagtcgacctgcagcctcttttggtggtatggctatgcaaactgagatgagggtacaatagggcatatgaaacttaattcctaagtaacaatgatgctaggataagattaaaaacttgttaggagtttagtttgttgcaagttgatctctttagtcctttccatgttattttatatggagatggaatgggaatattgtcatgactcgtgaatgtagcaccccctgagctttttgttttattgcactttctagttatctaggtcaacttttagtgaagatttttcatagaggtggatgtgggaatgtagaaagcatcagttctgagcattctagaataatatttatggcatcgtctttcttattagaaatctagatattgtaacagtcgttgacatataattgttaaataatgatacaaaccatttccacttgacgcgtccatccccctgatttatcattattattcagtattgtgttaaccatccacattttctgtattgtcacatttattgaggaagtagtaaagacaataggaaaaggcaaaatgacgagagatgagtgaatcaatcaaaatggctgttcatatttaaagtctgtgtttcactaaagctcgctcctattttgcaggcctatttctgatgcagttaatcagaatgatctaatgggtattccaaaggtacctagtggagtttctggtactgctttagctgcttctattcttcgtgatggttggagtgtatgtactacatctttcctactctttttttctttggtttcacctctctttatgttgcttggaa

SEQ ID NO: 19 - DNA, 740 bp, Zea mays
agctcggacggaggaagctccagtcgacagcaaagactactggggcgcgcactcacttccacggccactgggtctcggactcaccgtgaagccacggcaatctgatggacatggactaggttaacatctcctgagcctgaaacgtgacagctgacatgggtcagagtgaaaagaaaattagtttaggcattaggggacacgacgcagaacggggtggctcgaggccaagcgggcggcggacccgagcggataaggacgagctcggccctcaactgtcgctgctgtggcgcatgacacaaacacaaagcatggtttcctgttggtaatttaccaccactagcgctagcctacaactggtatgttttttgtttttgtttttttttgcattggatcgtagaattataaactttataatatgccataaaagctgaaggttgcagtattagtttaaattattctatttgttaatttaaaacgttgtcgcaggctcgcagctgctgttgctgtctgctttcccctcccccggtctacaaagacctcggctttcctttcctacatgctcttcttccttccaaagccttcgcatttttcctctcgtcttccccttccccttactccaaattaccccctgctatctacatatcctgtccacactttccttccctgcgctgggccttggagttttttggttgtgtatcgggggaaatgggaaatcgacgacgaaattgccgatcaatagt

SEQ ID NO: 20 - DNA, 850 bp, Zea mays
agggttgcttgacttgtgtggtcgctctgggatgaagggtaagatgatgtattcccatcgccttttgtttctagctgtcttgctttcttaaatttagagttcagttccgattgctttgcaaattagactttttgcgtagatttgtactaggcttttttgcgtagatttgtacatgtgcagcaagcaactcgttgcagatgatctattgacaattatgatggaccttctaacaatcttctcttttcctttcaggggccttatgacataaatcaaccaaatgcagactgatcttagttgattttgtaagtagtgatgtattttaggttcatattcatgatattcttttattcatcgtctgtattacaaatgaaaaggacggaaaagtaatatatacttttcttacacagtagtgatgtattgtaggttcatattcattatatattgtttcattcaccgtatgtattacaaatgaaaagggcggaaaagtgcaagaacattgaacctctggttcagatctctgatagcgtcaagatgaaagggctgtttcctcagttccgttttgtttcgtttttggatgaattttccatttcttgacactacatgatttctttccagattgtatgggtggagagaaatgaaaccctgtacaaaattaatgatgcgggctcgtaatgtatgctgtccttgctattctgtctcgagaaaaatatgatgttccgtccctctggaataaaaaaacaaaaatgcatttagacatttcgggtacatgaattctgttttgagaaaaactggatgtggagggtttcagtaatcccagatttacatatttcgtccacgaaataatggactt

SEQ ID NO: 21 - DNA, 1223 bp, Zea mays
gtgcctgtggctcactgcactaccagaacacaactcgctagctctgcatcatccgtcgttctggtgagcgagcgagcgagtgagagacctagctagactgaccggcggccgccggcaggccgagaacgaagcgtttgtgcatgtatgaaagtttcgatttttatactgtcgtctacgaattgttccttgatataaatggttgttgttagtgcttcatcgatctgatctcagtgaaggagcaggagccatggcggaccagcagcagccacagcagcagccgcaggagatggacgttgaccgtaccggtggcctcgaactgcctccagggttccgcttccacccgagcgactttgagattgtcagccactacctcaagaataaggtgcacgacagggactacagctgcatcgccatcgcggacgccgacctaaacaagaccgagccatgggacctcccgagtatgtaactaacgagcgacctcgatcgatcgatctatctgtgcatgcagctagcggatgctgctgctagtgctagactaggcatgctagtgatcttgctaggtgtggactgactgatacacggtgcttgtttcgatcgcatgcatgccgcagaagttgcaaagatgggcgagaaggagtggtacttcttctaccagaaggaccgcaagtacccgacggggctgagggcgaaccgggccactgaggcgggttattggaaggcgaccggcaaggacaaggaggtctacgatccccttgcagcggaagggctgctgctggtcggcatgaagaagacgctcgtgttctacaaaggcagggctcccaggggtgacaaaaccaactgggtgatgcacgagtacaggctcgaaggcagcggtaggctccctgctagtcctgcatccgcatccggctcagccaccaacatcgctgcggccatgatgaaagcttcagcttcggcttgcaaggtgcgtggtaccagtaatatatatcaatcaagttcagcaaccatgatgcatgcatccacatactactttctttgtttgcttgcccgcccacggtcacggcttaattacaaatgaaatccgcgcaggatgagtgggtggtctgtcgtgtgttcaacaagaccaccgggatcaagaagacggctgcgccggcataccaggtggccatggccggtgctgagatggatcagaatcagaacaacattccggccatccccatccccat

SEQ ID NO: 22 - DNA, 1036 bp, Zea mays
cgaagcagctagagaaaaagagctagccatgcacaccgcggccaccaagcctctcctcgtcttctcgtcttcgttttcttcacgtccatggcggtcgtctcccatgcatcgtccctacgcttccaatacatcgaccgtcgtcacaacttcaccgccaagcaggcgagcacctcctcctcgtcgtccccgtcctctgcacacggcagccgcgaccgccgcccttcgttcgcgctagtgcgccgcgacgcagtcaccggctcgacgtacccctcgcgtcgccacgcggtgctcgacctcgtggcccgcgacaatgcgcgcgccgagtacctcgctagtcgcctgtcccccgcggcgtaccagccgacgggcttctccggctcggagtcgaaggtggtgtcgggcctcgacgagggcagcggcgagtacttcgtccgcgtcggcatcggctcgccgcccacggagcagtacctcgtggtggactccggcagcgacgtcatctgggtgcagtgcaagccgtgcctggagtgctacgcgcaggctgacccgctcttcgaccccgccacgtcggcgaccttctccgccgtgccgtgcggctcggccgtctgccggacgctgcgtacctccgggtgcggcgactccggtgggtgcgactacgaggtgtcctacggggacgggtcctacaccaagggcgcgctcgcgctggagacgctcacgctgggcggcacggcggtggagggcgtcgccattggctgcggccaccgcaaccgcggcctcttcgtcggggcggcggggctgctgggcctcggctggggccccatgtcgctggtcgggcagctcggcggcgcggccggcggcgcgttcagctactgcctcgcgagccgcggcgtcgtcggcgacgccgggtcgctcgtgctcggtcggagcgaggcggtgccggagggcgccgtgtgggtgccgctcgtgcggaacccgcaggcgccgagcttctactacgtcggcctgtccgggatcggcgtcggcgacgagaggctgccga

SEQ ID NO: 23 - DNA, 1259 bp, Zea mays
tggagaactgttcaggaatcttcctctattgatactgtaggttcaattgcttcagcagttggcattgttttagacaatttttgtttgattctgcattgacaacaaaggttttcccaaatggtttcccacttaggttgaaaatgatgatttgattgcctacggcctgatcccagaatttattggaaggttgccaataacagttggcctgaccaatcttagtgaagagcaattggttcaagtagtaaatttctttgattttttaatttaaagcaatatttcttaaaattaccatctcaaatatttccaccacctcaaaatattagaaattctctttgcaggtgctcatggagcccaaaaacgcaataggaaagcaatacaagaagctattcaaaatgaatgatgttagtttgtgattcgttttggccaacgaaataattgcaacatttggccgatttttttttactttaaacgataatttataaccaagaaagttatttatgttcatgtttcctccataaggtcaagcttcatttcactgataatgctttgaggatgatagcaaagaacgcactcgcaaaagaaacaggagcccgaggactgcggcctataatggaggacatttgacagaagcaatgtttgaggttgacttgttttttgattttgccatgccagtgggtaatccaatatcagcctggttgatagcactttggtcattccgttgcagattcctgatggtagacacggaaaagagaaggttattgctgttcttgttgacgaagagtctgtaggaccactacactctcgagggtgtcgagcaaaaatttttcgggatgatggagccttggaactgtatgtttaccagaacaatatcaaactgcccgggctgattcagagcaaccccagacgcagacgcattttccggctctgccttctagtcgcattatcggcaacaaagctttggatttaccagacaattccttgtttttcatcgatatatgaatggattgcatggatactatgcaaggtctacaattttacacaataaaatatgatgaggttgattttcgtgttaaactgttcacacagcaaaagaatggctggaccccacgttctgctttcttcggtagcttgcaatgattttgcaacaacaattcgtatcatttacacgctactggtagcaaacagacagttgttttgatactgaacctgaacaaatggaaaatggtttccaatggttacacatcaaaattatgtttgta

SEQ ID NO: 24 - DNA, 1109 bp, Zea mays
gctccttgcacggacccgatcagtctacctgcaggttgtactggccagctggtgcaatgtaacttattttccccatagaacccggtggaagagcaacatggtgctgcatcaatgtgttctcaaaaacagtctgcaacacacacccagtccgcaatcattaggatgtaaacacgggttaacagcatgcatttacatatcacagacagctagtcttcagaatgaagccatagatggaagtcaatgtcataagaacttacagcgtatagatctccacctgtgatgacatctccaacacctggaaatatagcacaagaaaacctatttagatagcatcaaagttcaaatacaacttagagataacaaaaacagcatgcaaaaccatttcaacaatggaggtactatgttaagtcactacctagcttcgttggctgaaattcccacaatacatctttgtcaagggcaggaactgaaacaccacgaggaatatacacatctcctgacttaatagcgatggtttttagaggtcgctgcaaacataatagagggcgagtgaggataatagacaaaaaataatgtaaatggccgcaaaagtaagccctgtcgtgttcagcacacctggataccgtcaaaaatgtttccaagaattccaggtcccaattcaactgaaagaggctgcatgggaatagccattacatgttaaatgatagcaaaagaatgatattaaaagatatagtaagatctgaagacaactaaaacaaacctttcttgttctcaatacagggtcattaaccatcagtccagctgtttcctcataaactgcaacacgcaaatgacggcactcgcgaggttagtaccgtgtattcaactggaaaggagcttttcatgcccatgggtgaataatttattatagatgatctgccatgttgcataccttggattgtagctgaatcgccctcaagacggataatttccccaatgaggttatcatgtccgacacgaacaagttcatacatggcagcaccacccattccatcagccacaaccacaggtccagagacctgcaataacccagcatcaaggctaatcaaagtggggcttgttatatacat

SEQ ID NO: 25 - DNA, 1199 bp, Zea mays
ctgctcggtccctgtgagcctctacagtcgacctgcagatccatctcctgggaagaaaattttacgccacatgtcagtactcgagcaagctaagcaattaaacttccagggagataaactagcgtgcagagtattgctgaactacactaacccttctttgcatatattcaacttcagcatacaagagctcattctgcatgcaagaaataaagggtgtattaattgctcatcagcacaaaagtcaaaatcgattacttaaaagcatattggttcctcataggcttggatgtatatatatgcacagctgcacacatttctagtctttgaaacaaattgcaaaaatgcctactttcattaggattttttttaaaatattagtgtcctcatttaaactgacaaaagaaggttacacatatactccgatccatctacaagctattttacatatctgtaccacagacagatatatcacacagttacttaatgcatacctttctagctctaatcttgtttatggccttctccagcttgccctccatctgcttaagctccctgaggcccatggtgtggattgaatctcccactatggtcctactagaccatttaaacaagttagactgcatatactactacaccttttgttgttgcgtaaaagaaaagccgaaacattgtatattagatttgtagaatttggtctaaatttgattgctgatacctgtttgcgttttgcaagctatcgatcgcctggcgcagcttgaaggactcctgctggtagtgctgcaagttaaagtatggatatatatatagtcagtcatcaaataaagcttcttctgcttgttgtgatgaataactgaccttatgctgatttttagagtagtacagaaaattaaaagaacatgacagagaatgtttagacttgtttgagctgaggaactattcatgatatactagctgactagctagatgccaaatcactaattgttgtttgcatcagtgaagcacagataagctccttgcaaaaaagcccttaaacatttctcaattttattttacgtttaaacagttatgtatataaactgaatatctttggacagaatcgttatgcagccatttcctaggatttccccatatgaataccggcgtggtttttaaatcgacaacataatcatgcccataaaaagcaagtataaagagagagc

SEQ ID NO: 26 - DNA, 1155 bp, Zea mays
atcatgaggtttgccgtcgtccatccttaagcaacgggcgcggcatcggcgcatactgtagcgaaacctgcaagaaggtgtgtacctgctgagtgctgcctagtctctccacttcatttggtttcttgtcggccgtatcagatctgttctgtctttttttttcaggtgtctgctcggttatcagacatggtaggcgtaacaaaccacaccgaagatggtttctcatgggctctgctgaagatccagaaagacgaggccgtcagttcacaggacattgctgctgttcttgaatgcaacgtgaagcttgcggtggcgcttggcgtgctgaacgagtgcttcaacccggccaaggatcgccgaactaagatcgatatgctccaccaagctgtctacagcctcgggtaagttcagtcagtcagcactgaaacatctgcgtctcttttcagttcttcgatagcaaaaaaggtttgtgcttcaacagatcagaattcaaacgggtgagctacgaaggattctacaccatggttctggacaaggatggggaaaccattgcagcagccctgctgaggtttggattcaggagtacttgtcagtgttcctggcctagtcgttgttgtatattactgtaagcaaaggtcttcttcttcttcttttttacaggatccatggcacaaaggtcgccgagatgccgttcgctgccacgctgccagcttaccggaaacaagggatgatgcgtcggctggtgaacgctgtcgagcaggtaggaggagcacgacactgtctgcctgcctgcctttctgtatgccactgtcactgttcaccaggtgtgagtgtgaagcaggtgctggcgtcagtgcaagtggacaagctggtgataccggccatagctgctctggtggacacctggacgaggtccttctccttcaggcccctgctggaccccgagtcgagggaggaaatcaggaggcggagtctggtggtcatcgccggcaccaccctgctccacaaacccgtggccgccgcgcggccgccgtcgccacacagacacgctgaagcagcggcgccgaagaatgcagggctgccgtggtggtggaagtacacgcagcaggcgccgccgctcacggacgacgagcgggccttcctggacacggcgcc

SEQ ID NO: 27 - DNA, 408 bp, Zea mays
tagagttgtgctcctcaacatccatagccccctgtgattcctccactgtgttacatacagttgcagtcaaaatttcagaggattgaactagaaaacgtgcagattagcatcggttgggcagatacgtcaccctttgcttcttgcgcagaaggcagaatcatctcctgctaactttgatcagcgaacaaaacttggttctctccccatttcaaattttaggcatagtttaacagccaatctccaacaataataggctgataactggaataacctaaagtaattttaaattatcgcaacaatggttctgaattataatactagcattttgccctccaaagcgaagagtcagaaccaactccagggaagaaaatacagcagaagtaatgtgtatgaagaattgaagataca

SEQ ID NO: 28 - DNA, 466 bp, Zea mays
  unsure (1)..(466): unsure at all n locations
ctgcattaagcttgtgcactgcgggtctgcggctactgttatttgcacctttcntttttgcaacggcaattcaatccatacgatttcttacgttgttcataaatcgctctcagattacaaaacagggatatcaagtacaattcaaaggaaaaagaattccagcgcagggacagggaagctggaagacggagcacgacactattgctggccctgtcggcgacgtacaggtgcggagaattgcatttccatccagcggctctcaactctactaggagaaaataacaaattttggtactgcaagcgctacaaaaattaagtacctttattttatcaaaatgattcctggccagcttcattgcatcggccgttccatttgacctcattattttgtacgagcgatcggttgaatccgaagaaaaaaaaagcgaattgcatgtgtgtatgctggcgtgtacttcccgcagat

SEQ ID NO: 29 - DNA, 422 bp, Zea mays
atcctgcccacgcagaagatcggcctcgtccagccgctggaggagctgctcatccactcgttcccgctgccctccttcctcatctggccgggctactacgtgctctaccgcttcatcgagaagcacggcgccgaggccgtggcctacgccgaggcgcagcacggcatcggcaagaaggacgccatcaacaacatgctgttcgtgctcggcttcaacgccttcggcggcttctccgtgttcctgcccttcctcgtggccaaggtcggcggcgccccggcgctgcgcgagcggctgcgggacgaggtgcggcgcgccatggtgggcaaaggcaaagacggcgagttcgggttcgccaccgtccgcgagggcatgccgctggtgcggtcgacggtgtacgagatgctgcggatgcagccgcccgt

SEQ ID NO: 30 - DNA, 379 bp, Zea mays
tgcgcagcctacagatccaaagctacgtactgtactctaaattccttgctgtagtacgtgaaacgtgatgcgtatccggccggctcccgcgagacaggaagagacagcgactcgcagacttgcagctgcccagcaggcagtagcttgccctttttaatcgcagcacttggggttgacagtcacacacacactggtcgcggcgcggcagatgaggcgccacaaatctgaaccagcatacagttagggcccatgatttcccccctttctctatggtttttatatataaaaaaactgatttatatgaaacttttgtatgattcctcctaaattcctgcatttcaaataagacatcgagctagtgtaagcgtaggcctgcaaa

SEQ ID NO: 31 - DNA, 379 bp, Zea mays
tacataatcggctgcatgtcgacatgcgacgacccactgaagaacggctcatgctccggcaccgctggctgctgccaggcggagctcccgccgggcgtccagttttaccaaggcttcttcaactcgctgcacaacaccaccaagatatggaagcaaacaccctgcaactacatcaccgtgatggagagcgcggccttcagcttcagctccacctacctcaactcgacggtgttgtacgactccgacgacgggaggacgccggtcgtgatggagtggggaatcacacggcagacgtgcgaagaagccaaagccaacaagactgcgtacgcgtgtgtcagcaaccatagcgactgcgtctacagcgatgccgccggctacc

SEQ ID NO: 32 - DNA, 662 bp, Zea mays
attatattacctactttaatttcgtgatgatattaacccggattcttttgtttttcagattttcgcactgcacatcaccggaactgtcgatgctgtcctgtcgaaagagcatagacgtgagatatgccgccatatctacaaccatcaggtacctatcacaagcactttttaaatagtattagggctaggacacctacaactcaattaaatctcaattaaatgagaggtatttccaggggtctctagtggacctaagtgaaaaaaaaacaaagaacttgtctatatatacacaacgtactctttatacatattatgttgtgactaaatttatatatatgatctaaactcttagagttgtatcatgcattattttagctatctcttttactttgaaaatccgatctgaaaacttagagttgtacatgctctctctctctacatatatataataaaacgacgctcattgattgattgattgattgattagaacgaggacggcggatggggcttcaatatcatagacgagagcgccatgttttcgacgtgcttaaactacaccagcttgagacttctgggtgaggtgcagcaggaggagaacgatgggctagctaaaggtcgagaatggatcctatcccatggaactgcaactgcagtcacgcaag

SEQ ID NO: 33 - DNA, 582 bp, Zea mays
tagctcactgaagagtgacgatcgagctgttcgcacgcatgcacacatatagcgccatatgcaagcgctgtggtgtcagcagactagcaaattagagaggcttagctaagacacgtgcatgctcattgcacaggtggagtttagctaagaagctgcgtcgtctggagcgtggcgagcaacacgcaccaaacatctgtgtggtggcaactataaactgaaaaatatatatgtgctttgattatattagcaagcgctgctgaagctgaactagctagccaaataaagagttcatcgagcagcagtagtgccaagagagatttgcatgacaaggaaaggcaggtcaagcaagaacacgcgaattaatcccgatggttgatggagactggactggagagcgaggcatgcatgaacctatatctttctatcaatctatcttatcaacaccaccacatgcacccagcagccaaccagctgcttattcttggcaagcagtgcgttaacgttaaaggcatgcatggtatctatagcggcacaaagctaattttgcgttttcttagccttttcgacccgtgcagaagctat

SEQ ID NO: 34 - DNA, 715 bp, Zea mays
tcctctatgggcggcttgtctggctccacgttacgagcaggaaaaccggatgagcaaccgacgattagatagcacatccaacacaacacaatcacacaccagacgactccagaccagactgacagtacatacatctgaggtagaggttgaccgcgtggttgaggaagccgctgccccggacgccggtgagcaggctcgttatgggcacgaacgacatggagatgacgtccgggaagccggtgatggtggagagccacttgccgtggccctgcccgctgtcgacgccgcctctcctgacgtgaatgcacaccatgtcctgcgaggatcccaccacgttctaagggcgttcgttattcacattttcttggtgacgagcagtgcagtagaatcgttggggggcaaaaccgcaacagtacgtgcttgcttacatccttgtgagacacgacgggtgatctgaaggactgccaggcggccgatccgggcccaacgtttagcccctgcgacaacctgccgcctcccgcggtggaagaattggaacttgcggtggaatcctccgagaacctgtcgtcggcgagctccttgagccgggcctgcacgtcgctctgcgtgaggctggagcccttgagctgcttcacgcacaccacgtccttgcctcccatcttcaccccgacgatgacgtgagtcccgtacttgtcgatgaacctgcaggcagcag

SEQ ID NO: 35 - DNA, 1038 bp, Zea mays
aacctgagcatcggcaccagcacgccgtccagcgaccggttgaagaaggcctgggacggcgggaacgagtcgaggatgatggacgacgagtgcggcgtcgagaccttgatgtaccggtccagcgccgcggccaccagcgcgttctggaggtagcgcatggcgggcatgagcagcggcgccgcgctcggctgcgccgagagcacctcggaccccacggcgatggccgtgatgttcacggcggggaagtgcgcggccacgttgcgcgccacccagttggccgccgtcgcgttcgagttgccgatggccagcagctgctcgttgggcacggacacgatgacgcggatgccggtgttggacagcgccgccagcatcgccgggtccgcgtcgtagagacgcacgtggcggatgttctgcgaccggagcagcgtggtgatctgcgtcggcgctggcaccgacgacatggccgtgccaatgttcacgccaatgtacgcacctgtacgcgatgacaacaataacaaataaatgcagagaaccaaagtgtaagaaatctttctttcttgatggaagttacgaacgagtgatagaaatctaacgacggtaacaagagcatcacagttttcctggtaaaaaacgccaaaacttaacagtcagatgtttatatgatcttctgattaatgcgagacaggaaattgcgttgtaaggcagcaatcctcaatataaaaacgcattctttcgagcaaagctgtgtggaagaaaaaataaaataaatcgttcgtacagtctagagtaatgtaagaaaggacgaaatgcatgataccaccatgcgttttcgtagcgaaaacaaacaaacaaacaaaagggaaatcgagctagctgtaaaagcacaagacaggccaacttggtacggggaaagacgttggaaacaggagccccctcaccatgctgctgtcccgggcccggccatccacagaaaatcctgggcaatgtgcagtggccagtgaccacgttgattcctgctgctgttgctgcaggcactgc

SEQ ID NO: 36 - DNA, 961 bp, Zea mays
accaacaacttcaacgagagcaacaagctcggggagggcggattcggcaccgtctactggggccgcacctccaagggcgtcgaggtgcatgcatgcactacatatctgttcatggtcttgtcagtttaattacatgtcgtaagctcgtgattaagattcgtgacaaatgtgtgcggtacggtgttcagatcgcggtgaaacgactgaaggcgatgacggccaaggcggagatggagttcgccatcgaggtggagatcctcggccgcgtccggcacaagaaccttctcagcctccgcggcttctacgccggcggcgacgagcgcctcatcgtctatgactacatgcccaaccacagcctgctcacgcatctccacacccagcgcggcgccccctcctcccagcagcatcagcccctcgactgggcacgccgcgttgccatagccatcggtgccgccgagggcctcgcgtgagtcatcatgcatgcgcgcgcacacacaccgacaccgtgcaagtgcaatcaaagactttccttaagaatccgtgtcttcgttcatttcagctacctgcaccacgaggccaacccgcacatcatacaccgggacatcaaggcgagcaacgtgctgctggacgcggagttcgtccccaaggtcgccgacttcgggttcgccaagctcatacccgacggcgtgtcgcacctgacgacgcgggtgaagggcacgctgggctacctggcgccggagtacgccatgtgggggaaggtctccgagagctgcgacgtctacagcttcggcgtgctcctcctggagctcgtcagcgcgcgccgcccgctcgagaagctccccggcggcgtcaagcgcgagatcgtgcagtgggcggcgccgctggtggaccgccgcaagtgggagcgccttgcggacccgcgccttgccggacgcttcgacttgctgcaggcatgcaagat

SEQ ID NO: 37 - DNA, 917 bp, Zea mays
ccaggaatgccatgacacgcaactggtgacagcaaccgatggtggatggatggacatgccgtcgacctttccgctaattaccaacctgtcctctaagcaactggtgacagcgagcaatccagaacggatagagtataccacttcacttgctttgttttagcacgtagtagtatttttttcccctatatctcgttgtgtatgtatgatgatgacgagtggatctttagctggtgtctggctggctggttgcggcacagcgaatggatgtcgtgcaggatcggagccaccggacccctttgtttatcgttgctgctatgctcattgctccgcattgtttagtacgcgtcggcacgaagcttgccgcggcgcgacacgcgcaaaaggtaaattaatctcgcggcgaggcaaaatcgctttgcccggagccccccccccgacgggcgacggcgccgggagggaggacggacgtgaactgctgctcctcccggtggctggctggcatggcaggcgcgacgccattacttggtcttgtacacatcatgtccgtagtcgagctgtcgatcttacttgcaataccatgctgggcctacggtgcggtgtggtgcagctaagcttaggggatcgttagtggattctcgagtgctgcgtatcacggcgaacaacatgtgatgcgatcagaccagagtttcgtacgtcgtgtggtgtcagtacatggaggatggaatcacggaaatggctgtactatatatcctcagaatctgcgttttttgttacaccattgtcttatgtatacagcggccgggcctacggggttcactttgcgctctgttgaaaaattctgcctcgaccacaactccagatgcagactggccattagcgtgcgtgctggattcttctgatcagcacatcgagagcat

SEQ ID NO: 38 - DNA, 539 bp, Zea mays
aactcaggatgttccaaggtctgtgatttgtaatgttcatggagttaaccccaaatttattgagattggcaaattgaaacatcagcagctatgccaaagagagcaagcattcttcaagggtgcatattatatcggaaagatggtatggagtaaaggttacacagagcttcttcagcttcttcataagcaccaaatggaattgtctggccttaaaatggagttgtatggcagtggggaagatgctgatgaagtaaaggcatcagctgagcgactgagcttagatattagagtctatccaggccgtgatcatggagattcaatatttcacgagtgagtatttaatagatgaacaataactttttatacattcttactagctgctagattgttttatgttcaggtataatttatgataagttctttgtaccatcactttataatctttgagtctcgactgaactgtgttattgattccattgtctgtcccagctacaaggtcttcataaacccaagtacaactgatgtggtatgcacaacaa

SEQ ID NO: 39 - DNA, 526 bp, Zea mays
tactcacaccattatgtccagtggtgtcttcattcagctttgctgttttagtactgtgatcgccatggaacaggccaccttttctcaaccttttcaaagcaggagagccaaaaaaatcatcctcaactgtgttaccatcttcagcatcataattatcatcatcactatcctcattatacttaacttcttgcttctgcctgctagatctgcgagtttgttgacctggccctgccctattttcagaaggaccatgttttagaatctcttcctcactgtcgctactggtttctgatatgctagattcactggattcaaatgctgccctcctgccccttttcaatccagcacttgatgaagcttttgaaggtttcctggtggactgtgcagatttcattttgtttttcagtccacctgcgttaccatcagctttccgctttgtattcacattagcatgatgagaactggtattaacatgaactcctgaagtggcagaccagcctttctgaccagtgacatttgattgatg

SEQ ID NO: 40 - DNA, 530 bp, Zea mays
ttcttctcccgcaaggtcttcttgtgttcaagcttgtcctccttgtcgtgtttctgcatttctctcaacatctctgcataccgctgggaaactggagcaagagacaataaggaagttcaaatttagggttcacatccttcacgcaaattattgacgacaaagaaacagagacagaacagacttttatccttgtgaaccacaggttctaaagatacttcttcagcgacagatgcaagaggtgggatggcgttgccctcatcatcatacttgacccttgttcctgatggcctgttcacgtttatcttcagtttcttctttttgaagggtctttcaagtctgacaaagacaactggttagcataacttcggcaaacaaaacctggaactaaatattcggtagcatcaaatttcaaaggtagaaatgtcttagtttgaaaattgagttgcatggtacatacccagtcacatttgtatctgtggcagactccttgggatgaaggacatcatcaagtctgtcatccatattagcat

SEQ ID NO: 41 - DNA, 507 bp, Zea mays
cgctgaaccttagctccaaccacttcaccgggccgctgccccgcgagctcgggcggctcgataagctcgtcgtgttggacttgtcgcgcaacgagatatccggccagatcccaggcgacatgagagggatgctgagcttgatcgaggtcaatctgtcgaacaaccggctcgcgggcgccataccggtgttcgggccgttccagaagagcgcggcctccagcttctccggcaatgccgagctgtgcggcgacccgctgaccgtagactgtggatcatcaatctatggctccagctatggaacggagacggaccacaggggaatatcttacagggtggccttggcagtcgttggttcctgcgtgctcatcttctcgctggtgtcgttgctggtggcgttgttcatgtggcgcgagaggcaggagaaggaggaggaggaggcgaagaagaaggcggcggaggtggcggtggcggcagcagccccacaggtggtggcctcggccgtgttcg

SEQ ID NO: 42 - DNA, 781 bp, Zea mays
agggatgctgaaagtaattccatacctagaaacactttcatacactcatttgcctcaacaccagcatctgcacaacaataggaaatagaaagtggcttaaccagttcatctgtatgtcggaaataaacaaaaacggatgaaggcacagaaacgtgcaagggacatccacacagatgaacacacagcgcaattaacttgtatgattgtatctcatagagcaatccttatgggactgatagaaccccaaaagcatgatatctcttcaggtttgcagaaaccaaaacaggtctacagtttgaattatgtcaagtgcactccacaaagaaagcaaaatgaaggaaaatgtaagatgaatagaatgaggttcaccatttccttatcacactttaacctgtgtgactatccaaatcctctaaagacagtgcattaggggcttaaccaaacaaaaggttagatccaatgctccacaagcagacaagcaataaattacagacaatgcacagcctcgatccagaaaacagggcaaagcctaacaatttagcaacttctttccacctcctttttactaatagagaataaactccccacgcttcaatgtcgcaaccaccaaattaagcaaggcagacacatctaaatgagaagcagcagcctctcggctacgctccacaggcatatccggcggaagccgccaggtcaaaataaacataaaaatgaacacacgccggaacccaacaagacagcaggcgcgtcacaacacgaatgggatctgcaggcatgcaag

SEQ ID NO: 43 - DNA, 723 bp, Zea mays
aagtttcacattattaagtctgattttcatatctcctgaccacaaaatttttcaaccgcattaccctttacattttattgcctttcagcaagaaagttaatattaaccttcaggacacaatgctaatactgaaccaatatttcatacaggattttgctgataaaatggcagtgacaacaattatagttcctaatgcactgaataatatgacagctacctatagactaaatgtgaaacataacactaaagctgagtagcaaattacctggaccagcagcacgttttttagatggtgtagcaggcaagccctcgatacgaacattctgccttgacactaagtcatcaagagatggcattggttcagccaaaagaccaaggcggtttatttctgaagcaacagatggcctggcaacaatcagtgagttatacaatgatgaacctttctcccatgccatgctttccaaaagctgttcttctaaggaatttaggtgccttttcaattctcttgggagggtctcttcatgtctcacaaagttctcaattattttgctcaaatcaaatgcagttagaccggtactctcaagaacagcaggaaacatcatgatgactgtcttatgtgtcgccaatactaagtccgctgaacatgcaatcaaacatcggtggaaacgctcatttgacagcaatggagttagattatttacattgctgttttgtaactccgct

SEQ ID NO: 44 - DNA, 762 bp, Zea mays
cccctcttgcgtgcctgcagtgtgtcaccccttgcttggttcatgtcaaatcaggaaactagttttgtgacaattggacaacgagtgcttgccaatccactgaggtaaccatcttggttcatatttcattttacattcatgttgtggttatgcattatctattggttctagtatttcaatctttaggttgtgtgaatcgtcctcttatttgttttgttcttcggggtgttactatcctaagatgtttgctttgtaatttttttcctgaaccttctttattcagggttcggtttcattatggccatcctgatgtcttcgatcgtcttttccacgttacgaggggcggtgtcagtaaagcatccaaaattatcaatcttagtgaggacatctttgcaggtacttttcttttgctgttactgctcaacatttgtaaatgtggaaccactaagataatattttggcttcttatggttcaggattcaattccacattgcgcgaaggcaatgttactcaccatgaatacatgcaagttggcaaaggaagggatgtaggtctcaatcaaatatctctgtttgaggcaaagatagcaaatggcaatggcgaacaaacgctgagccgtgacatctaccggctaggtcatcgctttgatttcttcaggatgctgtcttgttactacacaacaattggtttctacttcagtacaatggtatttttctgacctgaattgtaaaccgctcttgtttattcattggttaacactta

SEQ ID NO: 45 - DNA, 823 bp, Zea mays
attgctgttgaatgtgtctggtttgtatctctaatttctgatttcatgaattggtttacatgtcttacgaacctaacaccctttcactggtttgccattatgttgtcattgatatagcacatgtgtctttcatataatctttgctgaacattgctcttgaccaacatggttaacaggtctgacggggaaatggtattcgtggacgataagcagttgaaagctaaggagcccctggtggtatgacctcattgttttctcatttcacataatgaagtaaaaatggaatgacgccacaacaattattattctggtttgcagcttattgattactatgagcaacaccttcgctacaaccccacctcgtgataaggatgcattgacgctgctgggtttcagttgcatgtgctgcacctatgtttggaacaaatggaaatgtatttaaatgtagcattttttgtgctagatgcatttgtagtattatttgagtaagtagataattagtaagtagccaatgctgagtgcaagtgaaacatgatagcatggtttgtcaaactaactgctcgatattgttactgttttcaaattgtcttattaatcgtgataatcatgattaatcgttcaagtcgatttggaccaatagtgattaatcgtcaaagtcatccgattaatggtgattaatcatgattaatcgtacaaatcggttagctagaatgactaagcagttgtacgacttcaaaacattattgcgtgtattatatgctaagttagttgcttcattgtacatgtggtgctgggaattggagatttttatctgcaaaattgt

SEQ ID NO: 46 - DNA, 743 bp, Zea mays
aaagttcaatcaacggttaaaaaaagtgatctgaatccggtatggaatgaagtgcttaagatatctgttcctcgaaattatggacctctaaaacttgtaagttttatcattagaaccttttaattattttccttatatccaaaggattctagttcaaataagagtacaatatggtaagtgtcatgaattatggcaaagtccttagggtgtttccttgaatcagtcacattatacttccctatgtcccaaaataactgcacacctcatttttctggaagtcaaactttttaaagcttgactaaaattatagaaatattatcaacatttgtatatcctaatgtatattatgaaattaatctaatcatacttattgtgcatcataaatattagtatatttttgtatatgtttagtcaaattttcaaaaagtttgtcgaagaaataaaacacttcacattatgcttcaagaaaagagcagagtgttgagaaagtagccaagaaaaaagctgctggctattagcgacatgaaagtaatacacataatatctatgtccaggaagtgtatgaccatgatatgttctcagctgatgatatcatgggtgaagcagagatagatctccagccaatgatcacagccgccatggcctttggagatacttcacgtcttggtgacatgcaaattgggaggtggttcatgaccaaagacaacgccctgatgaaagatagcacggtgaatgttgtggca

SEQ ID NO: 47 - DNA, 874 bp, Zea mays
cccggggaccctctagagtctacctgcagaactaagtggtttattagcattaggtatatagcttggattcaaatagttttggaaagagccgatgcattaaagaaactgttggccctgctctcatgggaactagtacagaggcatcatagtcatctactcatctgtattttagtcttcatggactaggaaggatggagatggcttccactggatgatttttatttattttagtaaaacatggcagctgttagctatatgactgagatagattatcaaatcatgtcaatgtaatttctaagtttctggtgtccctatgttcgacaatgttttcttgttgtgatactgagtttctcttttcccttatttttcttttcaggccactcatatcacttgcttatcctctgtaagtatctcctttgtccttagttgactgtctcagtattttcctcttgatactatgtccaggggctaagccaggatttgttttttttttgggagggggacaaatcagattgagggggctgttagggaggtattttagcttatttgcatgatgattagctaaaataattagtggctcctatagaattacaggagcattggggggacattacagagagcctggagcaatgttacagtggctcctaactatgtcccaacctctgcctccctgtcttcgcccctgactatgtcactggcaggagtaaataggaaattggagttgtggctaaagactccggagtccaaaggttttatacttagtagaactaaaatcaaatatatgagatgtgactccggtactactagacatgaggaaagagatgttagttgggtactttggtgtccaagaagaatattttcggtattaatgaac

SEQ ID NO: 48 - DNA, 825 bp, Zea mays
tgaatcccacccatcttagcttccattactaatctcgttatccacaatttctccctcttttgtcaatcgtgtttggtctgattaggagagggcgctaaggaagatgtccggatcaccggtgttactgtcaatggaggactcctctactgccaacgttagttttcttcaactggatttgcttgaaattggtcttgttacaaaatacctgctgttggtgtatcaatttctttggggtttgtgattgcaaagttatcagatgatgaggatgatgaaaaattgggcgatgctgatgaagatgctgagagcgagaagctcagccaacctgttgacaatacgtctgataagcctgacgcacccagctgccgccttagatctggtatagaggtttagttcttttcttgttttacatagagccttctatcttttatgttgtgtgctcacttagagttttggtgttgtatacatagatcatcggaaggagaagtcccttgggctcctcactcagaattttgtcaagctcttcctcaacatggaggtgagaggactgaattcaccctgtatggtttgggttatttccctttcgcacttaactgtaatgaggcttgtatttcgtacaggttgggacaatctcacttgacgaagctgcaaggctttttcttggagagggacatgcagacagcaacatgagaagttagtacatgcattccttttgtttaattccatgcttatgcccaaatatttttcatatccaaatagaatttgcactgattctaatatgcaaaagcacccaaagtcgtcgattgtatgacattgccaagggcttgc

SEQ ID NO: 49 - DNA, 779 bp, Zea mays
cttgcatgcctgcagccaagtagctcaagtacatcaaattcaatctaaaaggaagtgcagcaaatggcataagagcatgtgtgactgagtgcaaaagcgggaagagaagcttcgacggcagcaaatggcatacgagcatgtttgagacatgttttatcatcaaaagcggcaagagaagcagtgcctcacacctcttgtccgggcgaagggctccccaatgcaaaatcagggaaccgcttgtgttggtcacctccaggctaatctctgacaccaaaccctgcggcgctgggttcactgcgacctgttcccacacaatgcaccaatagtgttatagagataaaaatcgtagcagatgggtgaatgaacctggtatccagcggtcgcacctggagctcggagttggaatccagcgtgaactttccgataagctgcgacaagagcaacggaaagacatgaaaatgaagcaggcaaattgccaaacagtgggagaacatcagctgatgatggcccagcggcgaaagatagagcaggcatgaggtgcttacgtcgggggacgcgcggtccgcggacgtggcgacggcgcgcggcacgacggggccgcggctagaggcggagagcgtcgtggggcggcgctggcccccgctgcgtcggagggacgctggctgcggctgctgctgccgcttccctggcgaggaggccgcgggccgtgccgcggaacgcgagcgcgcaccgttcaacccgccgttggcgttggccgcggcacctggaatcccggacat

SEQ ID NO: 50 - DNA, 757 bp, Zea mays
cagccaaaagcttccatttgcattgcgatgggggctctacctcgtggcctgctagctggcatctgcgccgtcttgttagcagcagtggttgcccttgcccatggtgcggaacaggaaacagcgtcaatggtggtcggcttggccaagtgcgccgactgcaccaggaagaacatgaaagctgatgcggcattcaacggtgcgcgggctgctataatttatccaaccatttgcaatttgcattttgctgggcaaaccatttgcaatttaccggtctatctcttgtttttttgtcccttcaggccttcaagtggctgtcaagtgcaagaacgccgacggcgtcttcgagaccaaggccctcggtgaggttgacaagtccggcagcttcagcgttcccctcccggctgacctcctccgcgaggacggcgagctgaagcaagactgcttcgcgcagctccacagcgcggccaacaagccatgccccggacaggagccgtcttggatcgtccggccaaccaccgacaacgacgacgacgataagatgaagaataccttcgtcgcagtcgccggcaaggtgcactacccatcaaaggagtgcgcctctgctttcctcttctaccatttgttcaagaagcacctgttgcacaagaagcccatggtgatcatccctcacatccacaagaagcccatggtgccgatgtaccgccactcgcccgtgccggagtacaagccacctcacccgacgcccaccccgatctac

SEQ ID NO: 51 - DNA, 792 bp, Zea mays
tgagaaatctttatcctcaccatgagaatgtttacctgatgaagataaaccatactttcccatgccaggagaaatgcaactgcgcttctgaatgtttttcagagtctcactggcaggactacttttgcttatttcaaactcagagggttgatgcttcatcacagggccattggattctttcttcattttctttgatgctcgcaggttatcatgatcaacccctacactgcttctcattcgacgtgattgatcttttccaacaatttctcctaaagaaatgtgaatctttagaaacaaaacaacagaaaggtattagtaaacttcaacaacacttaggtggtgcacctttatctgatgattccaccagcttccttttttccttcagtttagagaagtttctacttgaaggagcatgcagattctttgagggctttgacataccagttagtcagcgattgactcccagcttctgtactcatacttgtgctttcgtaaaagctgagtgaatcacctttttaaaaagaaaatagagaaagtatgtaatcgtgagagcaacgatggtatgcctggctgtgatggtgacggcccacgccctaccaattgttacatgaatgattactagtgctaagggcacacattggcatctatatatatctctgtcctataatagtatagctggttcactagaaaagtgcttagcctatttatcactgtcgctgcaccagcttaggtagcttcacgtcagcgttctggctttagtcacttgagttttttttattttgcatgcaatat

SEQ ID NO: 52 - DNA, 390 bp, Zea mays
tgtattccagcctgtagtactgtaatactgttgttgaatggctccctgcatgtagaatgaagccaaccataccttctctggctcaagggtgcatccaatgcaacgcggaagaactgctcgtagcggtggagccatgataacgggtctttggagccgtcgtacttggggaaacacagcttgtgagtggcggtgttgatgaaggcgctggtcctaccatcggccgtagaggatttcggctggaacacgggctggtgctgctcacatggcttcttgtagctgcccaccattgcttcggctggacattgttgacagtgatgtggagacaaccctgatcagccttgagggagacctcagtggacaggccggtcaccttatcctccatgtccatca

SEQ ID NO: 53 - DNA, 635 bp, Zea mays
ttggtttgggaagaaaccagcacgcatccgtcgctgtcaggagctgatcagatcggctgctggagttaagacggacggacggcgtattatggacggggaagattcctgatgagatggcgacaccaaaactgaaagccacgggcctggatcctcttctctctctctctctgtctctctcgattttctcccggattttcatattactattctctactagggatggatggtgtatgtacacaccgatacaatcaaggaccgtatcagcaggttgaataataacaacgataataatctactgacacgcgcaagtattttggggctaatcatcggggtggatgctgcatgccgacgaggagatcgagggggaatcggactcgtcgtcgtagtcgtcctcgtcgaagtcgtcgagatcgtcgaagtcccacagctcgtcttgctcctcctcctcgggcatctgccactgctcttgagaaatctcgccggactccagtagctccaccacctgcccattggtggccatgtgaatccagtcagttaagtaccaacagtgccaaatttaataaacagcactggagcttcaattgaccggtccagccgtccaggtccaggaccaggagtaacctctgccaacagca

SEQ ID NO: 54 - DNA, 462 bp, Zea mays
tgcagatctttctctgtgttcttgtcgatgttgacgctgaggactaggcttctccggcagatgaactggagctctggtgttgcgttgtggaagcctgctatcttcacaatatctcccagtctgtatcggtatagaccttcacagcccaatagcccatatcaaaaagcaagaacattaaacatgtgccatttcgatggagaaacatacaaacttccatgcaaaatcatgaattggaactgcagtgcttgaatcctactggagaaacagataatgtatgtacctgcaaaatttgttattacaacttcgtagattttgccaacctcaacctcagttaggcctacaggctccgactctatgtagtgaacagaggaacagatctccgtttcctcccattttggtttttccagaggaatgaactcgaaataagcaatgttaggaagaacagcgtacgtcacctcctca

SEQ ID NO: 55 - DNA, 560 bp, Zea mays
tgctccttagtgattccgatgactgccagagagcaagcatgcattcagatattagaacatgctctaacatgacacaacccacatagaaaacaaaaaaaaactatgtcaggcttacatttctcctgctcctgcgctcgccagccgatgttctgctccttattgactcagatgactgtcagagagcaagaatgcattcggatatgagaatatgctccaccatgaccaaaccagaatagaaactagatttatgcaatgcttacgtttcgcctgctcctgccctcgccagccgatgtcctgctgtcccaggtcaacctaaaatgagtgacaaactgtgatcagaaatttgcaatcgagcgaaaatcataaagcacctccttctgcttgtttgtcgacatcaaccaacctgacggtgtttccatctagcgaagagcagagtctatcagaccctgcattctggaaatcagccgaagagaataccgacaatggtgggaaccccagattactctcagactcctccttccacagggggatccctctagagtcgactgcaggcagcagtc

SEQ ID NO: 56 - DNA, 485 bp, Zea mays
tgtgtttatgttacatgttccaatcgagccccactcatacctttttcctaaaatgtttgataagggctcattggatttaccacctccttagtgtggggccttgagtaggatgattaacttccctactttattgccctagagattggtcagccagttatgctagggctccatgtttgacttttttgtttctttttttatgacaccaacagattgtatgggatgaattgagccaggggtcagtcaatgtgattcagtttttcttctgaattatttttcttttaagaaggacagaccatgtacaatggtgagaactctcactgagtctcaccaggtcatgggtttgcagccgcctctccgcattttgatggggaaggcttgcctcggtttatccctttttcccgaccctactagtgtgggagcctccagcactgtatctatcatttttatttttatttttaaacaaattgtccatatgtgtaacagca

SEQ ID NO: 57 - DNA, 508 bp, Zea mays
tgagggcggatatgtacaaggtgtacgtgagtttactacactacctatattgcaatattatatagactggtagtcagagttgtaaattggtaatcatttgatgactaaaataaccattttttatatgctatggaaacaaacatctagctgattgttgagaacactgagatcctaccaggtttgaggtcacgatgaaagtagcccctctggtgcatgtatgcaagagcctgaaatatctgaaaacaccagttgcggacttcagactcggagaaaggcttgaccctttctttcataagttgatagagattacactcctataaaaacaagggttcagattcaagaacacaataatggtgcagtagaatatttgctatacataacatatttaccatgtattccattatgaagtataatatatcattttccctgataacctctttgagcttcacaatgttaggatgattcatgcgccgcaaagacttcaataaaataacaataaaagaatata

SEQ ID NO: 58 - DNA, 489 bp, Zea mays
ctgagcacttgtcaatttggaaggccttgttgaagacaccagcatcaattgttctgattatctactgttttctttgtgtatggtttgtgggtggtttatctgtcttccatttgtacctgatgggcactaaccaggtaggtccaacattgattccagttcttttgtcattgatgctgcaaccgcagttcagtagcctaatccttcatccatttttccttgtagacaacatacgagaatttcaggtatcgctatgaccggcgcgataatccatataacagaggtactctgaacaattttctagagatattctgcaccgctatccccccttcgaagaacaatttccgggcaagggtgacagtagagcaagggctgcagcaaacgcgctcacagtctaggggtttcatgagccccagcatgggcaagccaaccattggagagcttgagatgggcaggaagccagtagtaccttgggacgagccaaggacggca

SEQ ID NO: 59 - DNA, 510 bp, Zea mays
taattcgagctcggtacccctggtcgatgatacaattgcaaatcgcaacatcaggattgatccctttctcccacatctgtttgaacagcttcaccgcggcactaattctgccatttttggccaatgcgtttatgaacgtaccaaaggtgaataggtctcgttcaaccttagatgcaatgatatcattccaaatcctttgagcgtctctcaggcttcccttgacacaccaaccatttagtataatgttccagctctttgtgacatgcgggaactcatctttcttctcacggaacagcgcctccgcctcctcaacatgcttataccggcacagcgacatcattagtatctggaacccgaccaagtcaagctcaaacccgtaatccttcctcaagtagaacacctctatcgcctcctgcaccttgtgcgcaccagcgtaccggttcaacagcacggcaaacatcttattcgtcacgaccacctgacgtcgctcctcaggaatctcgtcaaaca

SEQ ID NO: 60 - DNA, 675 bp, Zea mays
tattcgagctcggtacccctgctacactactattccctggcaaacgcattacagccgcagtactgctcctttggagcttccctgtcttgatcgggtggcgtcactcgttccatacttccatgggctgctagctgaacgctagccgacgatcacgactagacctggtggtgctcctgatctgtactgtacttcttttttgagcgaaccaacaaagcggcgagaagctctccaaaataaagccgctcgacgtacgcgacagcaacgtgtgccccctcgccgcacatctgcgtccaccaccgcatagcatcatcagtcggcatcatcattggatcgaactccaaagctagcactgcaggatgtacacatatatatataaacatcgtgagggagttggttgcatgcagtcgtcttgcttgcaggtagcgaggatcacacacacacacacacacttccttcagtgcgcgcactactacctgtcagtgagtcactcagtcagtcagtcagtcactcactcgcttcctcttcagttcgttcctctcgagaaccatatcccttttaattcgcatattctccctgcgtcgaacagcgcctttgcatgcgtctccgatcccttccacaccggctgcgccgccatctccggcgctagcgctactacggagagagatagcatcagct

SEQ ID NO: 61 - DNA, 635 bp, Zea mays
tgcagcagtataattttagggttttagctctagtagtactcatccattcataattctggtttatatatgttcaatattccacatgtttatgagaggacaactaaacgtattttgttgaaatgaagtcatcggtcaacaacataggtacatgttctttctatcagatggcattatgaaagcatatttcatagttgtaagaatgtgaagtccctgttgtattgcataggatggttacatatatatatatagactcggaaccctaaccctaataggtcagcagcccaacagtggtgccagtctaactacatatataggaacacacacacactccaacaatagttgcgtccatggtaagcagtttcatgtttttatcagggttcaggatgcttcacatagtggttctaaatcctgaatttgttattaactgatttttagttacttctccttttgagcagctctgaggcatcctagtttgtatccgttttcagttaaccgctttgtacgaaaacaagcattaatcctatcttgatttcctttttaacttgtaatttatgttttttggtcaattgtcatgaataggcatttggctgggcgtatgttaacaattggcacaacacatgggagcaggggtacaa

SEQ ID NO: 62 - DNA, 655 bp, Zea mays
tggaatccctgggtttccctaccattgctcaggctttggggaatctcaaagattccaaaaggtcttgcaaggtcaagaagtgtttcatcctttccgaggaggatgtttggctgatggccatataagaactgctggcatgtatcaacctgacggtaggcatgtatctggtgcagcttataaatggtctgcaccacaagggtatgatttcccacagccagcaaaaccggtttttctgttgcaagaatcatccccatcatctgtgatgatgtttccacaaactagatctaagataactcacttggaatatgagtactcaagacatgaggatggtagacttgataggactgttcctactcaagacatgggaagaagcaatcaaacattatctctttggcctcatcttgtttcaggcgaagcaatagaagaatgtactggaactgtgaatatgcactcccccgtcagtggtgcagagcatgaatcaaacaatgagagtacagttgaaaatggctgcaaaatctttggtatctcattggctgaaaagatccgatcatgcgatgaagcagactcttgtagtgcaaaatgtaattctcggctccagcctttgaagtcacaaatgccaaaatcgctaggcaggggtaccgaggtcgaattcgta

SEQ ID NO: 63 - DNA, 637 bp, Zea mays
attcgagctcggtacccctggtagaacgctatcggcatcgcctgctgctgatgcagttcgaacgtctggtcatgcgcgctgagttggatctgcatctgctgggctagactgttggacgagcaagagtcgccgagccctgcagtcgcgagtttcaggcgctggacctcggctgtcagtgcctcattcaatgctgttcgacaagacaacagaaacacgggattaacatagagggtgagggttcaactaacacgggattaacatttatatatgttctctcgaagcacatgtgggtactcctacatgctagtaattctttagaaagagtgatgagattaaataaaacacgagcaaatcttggttcccagatgatgcttagcacatcttcctaggcacttgtagctgtacctgtacgacatgctaacgactactccatagaaaaagcagccaaccaccaaagcaaccaagaaccaacccggccgcccggctgtctccaaatgccaacacgattcagagtttcagagccgtgggcacacgaactgggccggacaagccagcatgcatgtcaacgtcaacgaactgggaattaagcagcaagtagtgtgcagtacaggtgagatcggagacgcaccgtcacgca

SEQ ID NO: 64 - DNA, 720 bp, Zea mays
tgaggggagaggattggagggaggtgctatgcggcttgacagtggaaatgctagcgaagggccaggtcccgtgcttttggtttctgatgtcgtctccaagaagccaatgagtcaggttgaatcgagagatgaattggtgaacacaagtgaggctaggaatttggcatcacaagcagagagtatggacctcgacggcagggagtcatctatggaagcagagatcagcgcagagaacatggctaggttggctgggatgtctgcaggggagattgcagaggcccaagcagatattgtaaataagctgaaccctgcattgctggagatgctgaggcggcggggaagggagaagtctggaggcacgaaggatgtgggtaaggacaagggtctgaaaaactcagggctgcagaagaataaaagggctacaccaggggattggttgactgctggtgaacatactgggcactcctggaaggtgtggagcgaaagagtggagctgatcaggtcttgtaggttcacattagatggagacatattggggttccaatcttctcacgagcaacaagatggtataccacatggttttgctcatatgagctacatttgcttctgttggtgtggtatcctttagatgacaacctatatctcccactttcaggcaagaagatgccttcagaaagtgttgctgagcgtgatttccttagaacagaaggtgatcctgca

SEQ ID NO: 65 - DNA, 621 bp, Zea mays
tataaggagcaagtgagagcttgaagtccacctcaacgtggattaggggtgatcggcaaatcaccgataccacgggataaaattcggtgtctttactttcttgcattacttattgtcgtgcaaattattagtgttttgcatattgttcttcaagtattcaatcaccttagttgatcatcatagattatttacttgttatcactatagaatttatatctcttgttatattgattaaatttccctagtgtttttgattttagtcaaaaccgtctattcaccccccctctagccggtgtcctagatcctacactcgtgccgtgtggaaatcagaaatcaccgtcgccgtggactcttgcccacgatgtcgttcgacgtgcatgtgggagcctgggaacttcatggatgcgagcggaattcttcgtcgaagctagttggttgccgctactcacacctcaccgtggatggggtcctcgcgccatgatttgctggtatgtagtcccctatcaaatcaccatgctcctagcatcgtatagcacctgtaggacgagagtttgcgtgcttgaatagagtaccttctttcacctgcgatggcaccacagcggggtataatgactgtttgag

SEQ ID NO: 66 - DNA, 554 bp, Zea mays
tttatgaagttgtgacgggggttgctaagaagcaatcgaaagcccccaacggcagcagcaaaagcagcaaacctaactctaaagtaagtaaatatcttttttttgtgcctgtgtggctcaaaagtaatgcatatgtgctacatctcatatgcattacatgttgctaatgctgttgatgcaagacccctggctcgtttgctctgccatctcttgcagccatcaaaactgaccaattctaacagtaagcccgcgaagccagcccacccaaaagaagaggaggacagcggccgggaggacgcagaggaggaccaggcgtacctgtgtgggtcctgtggggagagctatgcgaacggggagttctggatctgctgcgatgtgtgcgagaagtggttccatggcaagtgtgtccgcatcacccctgccaaggcggagcacatcaagcagtacaagtgtcccagctgcagcaccaagcggagccgagaatgacggcaccctgggaacaggacctgctcccagttaacggaagcattttagaatcattaggagctataacg

SEQ ID NO: 67 - DNA, 231 bp, Zea mays
gtcagcatgtgatccgtgctaaggccttacagttacagcacactgtatgccggatttgtgttgctttatttatgttcctgcccgtgtatctaatcgttttgaactcaaggggagaactagtgacctactgatgagattaagatgcagcactgtttttgctagcgggaggcctatctgcagaactaactagtcatgtctgaggccctcagcacatatactctgtttggcatg

SEQ ID NO: 68 - DNA, 368 bp, Zea mays
gtcggaagacatggacttcatctctgacgctacccgaacacaccaatggatttaatttgaccagtccgccattaatttaggtgtgttcgtgacaaccgcggaacaacatctccgacgagcccgttccggtttacacgagtcggttgtattcaatccaaggactcagaacgaatcagtgacatactaggactatggtgcttgcgcaaatttggacaggggcaactcgaaacggccggtcaacatgagcaatgtccacagcagtgttcctaggtgacaacgcgtcttccttaagctatggcacagtagcgttcaattggccaagactaggagcttcactggtagtaaggaatgctaaaacatgagtccag

SEQ ID NO: 69 - DNA, 564 bp, Zea mays
agacgtggtgacggccacgctgacgacggtggcgcgccgcatgaccttggactcggacggcggcggcgcgcggatggtgtcctggatctcgatgaggatgagggagtaggagtaggcgaaggcgatgtcgccgaacgcctgcaggctgcgccacactcttgtcgaccggggtgaccgcgccgacgctgatccccgtcaggctgccctgcacgcccttgttggacaccacctgcgcgatgcccaggcccaggccgatggtggagtaggtgaaggacatgacggcggcgaggatggagagccacgatatctggtcgaagtccgggatctgcgagaagaaaatctgcacgacgccgaagatgatcatgtagggcgtgctggagatgttgcaggggtccccgtgcccctccacgtggaagcagttcgccctctggatcgccctgcatgcagcacacgtacgtcgcgttaattaccaaattatatatgctgagctcagcctcggacgaagttctctcgtggtctttttctatataatatatactcacagcatgctaatagaggcggaat

SEQ ID NO: 70 - DNA, 709 bp, Zea mays
cagaaccatagcacacatgctcacaaggcatcgtgctagcatgaacttcacttgtgctgagatgagggacagtgaacagagttcagaggcgaaaagtgcacctgaggaactggttcaacaggtttaagccattgtcacttgtctgtattctccttttaaggaacacaaaagggacttttcaatcattaacaaaatattctggtgcaaactataaaaaatggcaggtgctgagtgccggatggagagagggcctaaatttggcatgtgaaaatgcactcaaccgatatgatgcaacagcttacaacaccatcctcaggaatgcaagacctcaaggcatcaacaagaatggccctccagaacacaagttgcacggattcacctacctccgagtatctgatgaactgttccaggaacagaactacaccactttcaaaacttttgtcaggagaatgcatgctaacctggtgagtaacacccttgaaaatctagacattcataattggacacatttatgtttgagctacacgctgacagaatatatataaaaaattcaggattataatccaaatgtcgacccagttgcaccattggaaagatcaaaggcagagataccaattgaagaaatcctagaagtagcacagccaaaattggagccatttcccttcgacaaggacaccgacctaccagtttaaacactccatgatgcaac

SEQ ID NO: 71 - DNA, 741 bp, Zea mays
caaacagctacaaacattgcaacctgacctacctttgagaccatatataaagatcaccaaccagagagaggcaactgactcacaacacaatttgcagctacaaaaccattgtatatgtacggaggtgctattccttgacgtcttcaaagagttcatcttcgtcttcgtcctcgtcgttttctttggcttcatcagaatcgtagctgtcgtactgtaggaggctgccaaagtcgctggattgtgccttgatgagcctctcctggatcctctccttgatggctgtcccctgaggaagttttggaaacaagaatacataaatgagcagtggactcctaatcgaaagcagtggactctctgcgaagggtggtcagagggtaactgaccattgagtggcacccttcctcaaacttctctaagaaaccagccacccagcggtctgcattttccacccactcttcctggagttttgcaaccgtgctccactgtaaacaaacatgagtaattcagaaggctaatggacaaaagggcaccaaccctgtctaaataaagtgagggcttgtttgggtaatcttggattgaggtggtataaggtgtattgaagtgtaatatgaactaatttcttttcaatccctaaaatacctcaatccacttcaatccctctttatccaaacaaagcctgatggggttaaataaacacgatggtagatgcaaataccttctcccctactttttcttggtgcg

SEQ ID NO: 72 - DNA, 535 bp, Zea mays
gttgccagggcacttgtcaccactactgatgccattggctaccatgaacccatggatgcagtactgcatgaagcaacagggggttgccaacttgttagcgtggccgaccctgatgatgcagcaactgttggcctcaccgcttcagccgtgccagatgccaatgatgatgccgggtatgatgccaccgatgccgatgatgccgatgccgagtatgatgtcatcaatgatggtgccgactatgatgtcaccaatgacgatggctagtatgatgccaccgatgatgatgccaagcatgatttcaccaatgatgatgccgagtatgatgtcttcgatgataatgccttcgatgatgatgccgaccatgatgtcaccaatgatgatgacgagtatgataccaccgatgatgatgccgagcatggtgtcaccaatgatgatgccaaacatgatgacagtgccacaatgttactctgattccatctcgcacattatacaacaacaacaattaccattcatggttgagcccacatgttgagcc

SEQ ID NO: 73 - DNA, 984 bp, Zea mays
gcggtggggcctggccgacttcgccgccgccgtcaaggaagccggcgtgcacggcctcatagttcccgacctcccgtatgggaactcgtgtgctctcactctcaggaccgaagccatcaagaacagcctcgagctggtatgtgacatcaattatcaaggagaagcacgtggcgtcgtctcctagtctagttcttctgcgcaatataaaattgagaaagcagcgtctgtctcacgacatgaacaatggctgaacgcatgcaggtgctgctcacaacaccatctacgccagcggacaggatgggggagataacacgagcttcacgaggattcgtctatctcgtaagtgacacaaaactttccgtccaggagttttgctagcgactgaacttgccggccgatgacatgcatgcatgctcatgtatcctacttgaccatcacaggcgaccgtcaatggagttacaggtccacgcgcaaacgtgaacacacgtgtccagtctctcattcaggaggttaaacaggtaataatacgtcttggcgtcttgccaaaggaaaaggagagaaaagagagggagagagaaaaagatgccatttttattcgtttttgttgttaccaatcacaatcactgagctggctggctggcttgtgtttttttgtttgctgcaggtcactgacatacccgtggctgtcgggtttggcatatcgaaacctgagcatgtaaagcaggtaggcaaaactttttttttaaaaaaaatgcctcaaaaacttattcacatattttttttatagtaacaaattctaacagtatatatattgcacctggacagattgcagagtggggtgcagatggtgtgatcattggtagcgcaatggtgagacagttaggcgaagcagcctctcccaaggaaggattgaagaggctagagaaatacgccaggagcatgaagaacgcgctaccatgccagtgaactagtcgtatgacgcga

SEQ ID NO: 74 - DNA, 330 bp, Zea mays; identical to SEQ ID NO: 1
  unsure (1)..(330): unsure at all n locations

SEQ ID NO: 75 - DNA, 4520 bp, Zea mays
ggatcctctatagtcgtcctgcagctgcacacatactagccttgtgaatgatgggcggcggtattttcataacatgactcatgtatacagtataagccctaggattgagcattatggttgtatggttgacctgttgagtcgtgcgggattgctggaggaggctcatcagctgattggtgacatgccaatgctggcaaatgccgttgtatggggagcacgcctcggtggttgcaagatccatcggaatgctgaccttgctgaatatgtgctgaagcagctcatccgactggagccatggaattctgggaactatgtcatgctttctaacatttactcgaacagtggaagatgggaagatgctgcaaagcttatgttggaaatgaaggcaaaggggattgagaaggtcgctgcctctagctgggttgagcttgatgataaggtccacaagttctatgttggggacgattcacatcctctttcagataagatctatgcaaagcttgatgaattgggccacggcataccttgtagattgagcccatagcagcccatatttgaagaaaaaacaaaagaaaaagagcccaacacgtaacaagcaacatctcgcattgattttgaagcgtgagaatctggtctgcttattctgttcgctgtgtttttttcgttccactcagcttttcgcagccgccgttttacgttagccaattctgctgtcagcttgccgctgtccgctcgtcctttgagctttggtaggtactaacttgaatactagatgcatgcttctttgattcaccaccatttatcatcagaatgtcataatattgtaggtccaaattatcgtctctagtagaacaacgccggtaaattatgtcaatcatgcaacaaccgccgtgcttactattttttttactttaagtatatataatcttaggaaatactgttgtcctaccatgaatagcgctctggtgactagctaaacatgctattagaatataataaataatatatcgatctactatatctatatgtgtgcaatctgttttatatatattttagattacatatatttaaactatacttatattgtattctgtgctggtttgtcaggttgtgtctcccaaatatcttgcctttttgttgcattggactcttctgtggttagaatggcagcacccaagcccatttctcgtcttatttctcacgtcattcttgatttggatggcaccctcttaaacacagattctgttgtaagtaaggtagtaaaaccatttattctaaagaatggaaaaacgtgggatagcaagaaagctcacaagctagttgggaagacaccttatgaagctgcagctgttgttttagaagactatggactcccttactctacagaagagttcctctcgatgattactccgatgttcagtgagcagtggagcatccgtccgggcctcttgattgctaatttgaaggaccagtcacatctctctcagtgagctggaatgcatgtgcctgacttgtgggggcatggttttgaaattctcaggccaactttccttcactcgagagcttgatagagagaattcacgaggatggaagagtagcagagaagacactggacctgccaatgtatgccaagtacaaagactcgccttatctgagaaacccttcgaagcacgggagtactatcggtgggacccaggctgagatggattccaagtgagaagccccctggagggccactagataatctgttacttatttgccctatggtaaatgcgtcggtgttgatgcagaaacaattggactcattgtgagcttactcgcttcttttcgaaagtagttagtattcctcgaagtggtgtttttaccttgtaataaaggcaaaacagtattgttacgcggcggtcggggcgctctcagcgtgcacgaggttaggtgcattggatttgggatgacaggcggttgaaatagtgcactaggatgaggtccttgacaacccagtcctgggcactgcactgatcaatatgtatgctaagtgttggagcacaagagaggcatggatggtgttccagcagatgttggagagggacatcattgtttggaatgcgatgatcatggggcttggcatgattggccacgagaagattgcatttgtgcttgttggccagatgaagaactcgggtgtgaagctgaatgataataccttcattggattgctctgcagctgcacacatactagccttgtgaatgatgggcggcggtattttcataacatgactcatgtatacagtataagccctaggattgagcattatggttgtatggttgacctgttgagtcgtgcgggattgctggaggaggctcatcagctgattggtgacatgccaatgctggcaaatgccgttgtatggggagcacgcctcggtggttgcaagatccatcggaatgctgaccttgctgaatatgtgctgaagcagctcatccgactggagccatggaattctgggaactatgtcatgctttctaacatttactcgaacagtggaagatgggaagatgctgcaaagcttaggttggaaatgaaggcaaaggggattgagaaggtcgctgcctctagctgggttgagcttgatgataaggtccacaagttctatgttggggacgattcacatcctctttcagataagatctatgcaaagcttgatgaattgggccacggcataccttgtagattgagcccatagcagcccatatatgaagaatgccaatgtatgccaaggacaaagactcacctagtatcagaaacccttcgaagcacgggggtagtaccaccggtggggccccgtctgagatggattccaagtgccaacccccctacagggcccctagataatctgtaacttattttccctatggtaaatgcgtcggtgttgatgcagaaacaattggactctctgtgagcttactcgcttcttttcggaagtagatagtattcctcgaagtggtgtttttactttgtaatatagaaaaaactaaagtggggttgttttggatggcaccctcttaaacacagattctgttgtaagtaaggtagtaaaccatttattctaaagaatggaaaaacgtgggatagcaagaaagctcacaagctagttgggaagacaccttatgaagctgcagctgttgttttagaagactatggactcccttactctacagaagagttcctctcgatgattactccgatgttcagtgagcagtggtgcaacttaaaaccacttccaggagctaatcgactgataaaacatttaaagactaacggggtgcctactgctttggcttcaaactcaccaagatgtaacatagaagccaaaattttcttccaacaagggtggaaagaggtctttctctgcaattgttggtggagatgaagtagagaaggggaagccatccccgaatatatttttggaagctgcaaagagaatgaactgtgctccttcaaattgcttagtaatagaggattccttgccaggtgttacaggtggaaaagctgcagaaatgcatgtcatagctgtaccttcaatacccaaaaagactgctgagttcagttctgctgatgaggtgatcaattccctccttgatgtgaggcctgaaaagtgggggttgccaccatttaatgattggattgaaggtaccttaccaatagaaccatggtttattggtgggcctgtgatcaaaggatttggccgtggttctaaagtactaggaataccaacagcaaatttacccgcggagaatttttccgacgtagtgtcagaacatacatcaggggtatactttggctgggcaggactttcaacgcgtggtatatataagatggttatgagcattggctggaacccatatttcgacaataccgagaagacagtagaaccttggctgcttcatgatttcggcgaggacttctatggcgaggaggtgcgccttgccatcgttggctacataagacctgaggccaactttccttcgctcgagagcttgatagagagaattcacgaggatggaagagtagcagagaaggcactagacctgccaatgtatgccaagtacaaagactcgccttatctgagaaacccttcgaagcacgggagtagtactaccggtgggacccagtctgagatggattccaagtgacaacccccctacagggccactagataatatgttacttattttctctatggtaaatgcgtcggtgttgatgcagaaacaattggactctctgtgagctaactcgcttctttttcggaagtagatagtattcctcgaagtggtgtttttactttgtaatatagaaaaaaataaagtggggttgttgaaacttgagagtcaaattccgagacgttatgcacgttttgatttctgaattaatcgattggtatcacttgtactgtttttataaaaaaaaaaaaaaaaaaaaaaaaaaaaaaaaaaaaaaaaaaaaaaaaaaaattatatttttt

SEQ ID NO: 76 - DNA, 1074 bp, Zea mays
  unsure (1)..(1074): unsure at all n locations
gggagcccgaccgtgacggcattggggtgcccgtctgnccgagcttcgccgcgaccggattggactattggagagcggcagaatgaactggattgggaaaagaaatttcagcgagtgatggcgccggtcggtgagcgagcacaaaaaaggttggcgcgcacgagtcggaagatttcatgggctttcgtttatgggctctgcaaaataacgagcgctcgcccacttccagcgctcgagcgacagggtgactgggtgaggcacgtttcggttagtcccacctcgccgcctgaagatgggtgcgacgcgtgaggaggctacataagcagtgcccctgcctactttgcaacatacttacctggacggggtcgactggctatcaagaaggcccgtggcctagatcaatggcccacattgcacttggtggatgcgttggcttaccatctccccaagtgggagagtggacgtcataatttgtggtagatggggtacgcgacgcagttcaggtctcggtttgctgcttcttgatcagttcagatctcggtttgctgcttcttgatccagatcagggtttctgatccatatagtctgtactttgttacaaaaatcatgtaattttaaaactttttcccatatctgggttcctgatttatgaagtctacagttccggcgcctggcccctgccaattctgatttgggttcttttgggccagatctgggttctgaaccatgtagactttgtttcatgagccgttcatgagccgtttatgcgctgcagtctcatccacgaaaaaaagaaatgatgaacagaccgtcggaaaatggcccctaaaaagaaaggagacctggaatttcatctattagatacaataagcgactcgactttgggcaccggatatttgggttctcgcatcgatgaagaacgtaacaaaatgcgatacctggggtgaattgcaaaatcccgcgaaccatcaagtttttgaacgcaggttgcgcccgaagccttctggcggagggcacgtttgcctgggcgtcacgccacttacctgaacggggagaactgcttatcaagaaggc

SEQ ID NO: 77 - DNA, 761 bp, Zea mays
cttgcatgcctgcagaagtcataccttgctatttgagaattgaactattcgcctagatgtgggaagaaaatgagatactcttgttccagttccagatccagtatcatcaactttctgaccatgtccactactgaactgcctttgtagtgacgagtggttatgtgcatcagatgatctctctctaacacaaagaagcatccgtcctatcatgtagcaatacccgatcagcatgagaaatgacaaattcactgtccccaagtgttgttctaaactagaaatgggtactacaacataagctttatactgcatgcagtctcggaaaaaaaaacaatagtggaatgcccatcccttaaacatttactaatataacacttggttcacaatcatggtttttaaagcggcaaggcggtccaaggcgttggaccaccgcctggacacctaggcggcgcctaggcgaggtaggcgggcaaggcgcctaggcgttagaccaccgtccggacgcctaggcgacgccttaagaacagtgttcacaatgattttcaaatgagcaaatcagctgaggaaatcttctgaacagtacagtgacaaaagaagtttttggtagacctaaagtcaattgcaacatcaaaggacagctatgataattcaataaacaatagctagcaacggagaactagtacctaaataatccccatttcataattcaatatgatcatcagcgaagcaaactttaaatttcaaaaactgaaaggaaaaactaa

SEQ ID NO: 78 - DNA, 1188 bp, Zea mays
atggaggttgccatggtcgtgagcgcaagagccagcctgctgatcctcgtcctctccctctgctctccgtacaaattcatacagagccccatggacctgggccccctgaacctgctccccaccaccagcaccgcggccgcgtccagcgacttcggcaggatactcttccgcgccccggccgcggtgctgaggccccagtcgccgagggacatctccatgctgctcagcttcctctccggctcgccctcgctgagcagggtcacggtggcggccaggggggcaggccactccatccacgggcaggcgcaggccccggacggcattgtggtggagacgcgctccttgcccggcgagatggagttccaccacgtccgcgggggaggcgaagggcgtgcctcctacgccgacgtgggcggcggggttctgtggatcgagctcctggagcggagcctgaagcttgggctggctcccaggtcctggaccgactacctctacctcactgtcggcgggacgctgtccaatgccggcatcagcgggcagacgttcaagcacgggccacagatcagcaacgtcctccagctggaggtagtcacaggcctaggccagttcggcatcataaccagggccaggatcctgctgcaggaggctccggagaaggtgacgtgggtgagggccttctacgacgacttgggcgccttcaccagggaccaggagctgctggtgtcgattccggattcggtggactacgtggaagggttcatggtcctgaacgagcggtccctccacagctcctccatcgccttccccgcgagcgtggacttcagcccggatttcggcaccaggagcagccctaggatctactactgcgtcgagttcgcggtgcaccaccaccacggttaccagaagcagtctcaggcggccgtggaggccatctcgaggcggatgagccacatggcgtcccagctgtacagcgtggaggtgtcctacttggacttcctgaaccgggtcaggatggaggaggtgagcctgcggagcgccgggatgtgggaggaggtgcaccacccgtggctcaacatgttcgtgcccaagcccggggtcgctggcttcagggatctgctcatggacaacgtctcgccggatagcttccagggcctcatcctcatctacccactcctcagagacaagtaa

SEQ ID NO: 79 - DNA, 702 bp, Zea mays; identical to SEQ ID NO: 6

SEQ ID NO: 80 - DNA, 798 bp, Zea mays
atcttgcatgcctgcagaaacgttggcaaaatgtaaaaaaatccgctacagctggttttctataggtcacatgtaaggttactaacgtcaaccttaaaacaatttgctgctccactgaatgtgcaactgtgcatggcgatactaataactatacagcaatcaaatcataaagaaagagaaaaacttggacgaacctcaagtgctttgcagactttatcgacctcgcaggcatagtttatcttctttgatgtcattataagttcaacaacagcgatacacgagtgagcggaaggatcaaaaacaggcagggcgactgtaccatggacgttgtagctgatcgcatggttaagtcgttggtactcaccactgctatagtactgcacattcggtgtccactcgggcaccttttgcttatagacacgcccaggtaggcccaggtctccaacattttccgcatcaactgaaaacatgtaggtcatggatacagccctgtactgaagtaggccaatgctctggtggtcaagcacgaaaggctgtcctgaagtagtgagcacatagcggtctccattcttgactggtgcccagacttggaccagcagatgttgatcggtggactccttgaagtagcgaagagcgtgtgtcagcttctccttgaacaagctggagttgtctgtgccatcttcgtccagggacagatgaaactgccatctgtgactgatctgttcagctggcttgcttgaagtgtgagaattccctgggtgaaagaagcaagattgtaaggcgaggaacgggatgctg

SEQ ID NO: 81 - DNA, 1372 bp, Zea mays
aactcaatggatgtatcattgatgcacaaaactcgctgaattgaaatcatcatacgtgctcggcgaatcaggtcagaatctggatccatttcagatgtcctagaacgataagtgtgacctgaatctctcctatgaagtttttcagataaaaggttttgggaagagcatcggaacagcgatcaaagccagaagtaacaacaatatctgaagttccttttggccccagaacagttgattttctccaagatctccagcaggatcaaggaacatatatatcatcacatgataaagatcagcttgagagcccgtgcaccacttgataagaatcaggagtgctaagtaaccaaaaaggctattgaggaaaatcatctgtggtatgaattgataccttatgtcaagagcatttccatgatatcgtgcatcaaaataacttaatacaatccccaggttcatctgggcaacacccattagtatagacatcttcatctttaatgaatttagaaagggtagctcagaccgacttccacgccagcttgggtccaccccaaaaggatagggttcacggactttgatgagaccaaaagtatgtgcatcgctgcagcttttgtcccggcattcatatgcagatttgccaaatatatggaatggaactgagaagaactcattgtatataaggccacagtatattagaatattgccatcagaagaataacatatcgtccgccgaatgccaactccataaagctaccaagcttctgaaataagttatgaaccgaaggttacaggaagagattaagtgtgcttgcgcaaacactgtgaaataaatagcaagatgcaaagttcgaattaaggctcctgaaacagacaagcatcactggaagagattacgtgtgtttgtgtacacactgaaataatggcaagaagcaaagttcaaattaaggctcctgaaacagacaagcatcactggagccaaaggggccataaaaaactcttcagtgggtttcctgcatgcttatgtgttttactggattccatttgcattacaggactgattttctgaacttgtgtgtaatcggttatctgccatatttctaaacaggtcctgtgatataacaggttccttttttgcctctgactctatcagaatgaagtataatacgctcaaaaaagattaggagtagattgtttaagaatattctttaggcgctaaaattcctttgtgatatttaatacagtataacataatacatatacatgatttgtttctaatggttaattggttatggtaaagaaagaaagaaaaggaataaagttcagcatcatttacctgagaggaaaatctcttctcgcgaaatataagaaccaaagctct

SEQ ID NO: 82 - DNA, 1030 bp, Zea mays
  unsure (1)..(1030): unsure at all n locations
gtcagtgaagaagcttattcctttctcgtcattgtactcaagggcataagccaccacagttcccgttgtgtgaccagaacttctgccgattttgcatacttgcctccctatgaggctattaagtggactctgcagatctataaccttaacatccccaatgtcaccaacacccctaanctgtagttgtgactgtggagatgtcgaagtcgtgagcaaatgggatgaatgccccgtcggcgcgtacaaatgtctctgcaggctcattacaacatagcaagtatgtttgggaatcagaccatggcatgcatgtatgtttgggaattagaacattgtgtacatcatttggaatcatcagcaggaaaaaagaagaaaaagtaaatgtactgcatgattagagtgataaaaagcaaggaattctccctcccgtgaaaaatagttgtcacatttgtctttgcacggttttgatattttctttcaccaccaatttcttctagaacatattctaaaaattcttgaaatcacgagattttgcaagtattttcaaacaaaaatctagacatatattaacatgtttctaaaccagataaatttgatattgatgtttgtaattttcaagttttcaccagatcttatcctaaaacaacatgtatctatgaccaggagtcttttatttattcagagatagtcctaacttgtattttattttctcataaaaataacaaaaacggatgttgctttatttgcaagtagtaaactgaagagcaagtttgactgttaatttgattgaaaatattaatataaaatcacaaatgtcaagccttgcttgatatgaaaagatcaagcaataacgccatctcgtgaaaatttaaatatatagaaaaataaccaagcaattaaagctgcaagtaatacttaatctcctacattaaccgcataatttataactgctctacctgggtttgttccagcatagattccataccaaacatcatctgtgatgaaagatgttgccctttcgacagctccaaga

SEQ ID NO: 83 - DNA, 1041 bp, Zea mays
tcatccggcctcccgttgaacaagcagtcattatttgggaataatcttcttggcccggcctggggcctgggctcctgtcgggtcgtcgacgaggccagccgacagtctgcggggaccttctttcgactgcttctaaccgacgatccagtgatcggatcggccccctgtagcatggctcctaaggcgccggcgaataatggcgctgtcgtcgttgccggcggccatcacgggggcagcaccgacgtcggcggcgttgccgggggcgcgacgacgacgactgtgccgacgtatgtgacggcgaacggcaacggcaagcagcacggcacgaggaagcagaggcggaggcctgcagcggcagtcgtcagcccgatggacaagtactggacgcccgtcgacgacaaggaggcggcggaggccgtcgaggacggcggcgaggacgggcggcgcccgctccagttccggacgtacaaggtcaagggaatcctcctgcacccctataggttgttgaccttgctgagattgattgcaatcatcctattcttcatatggcgtatccggcatccgcatgccgacggaatgtggctctggtggatatccattgtcggagatttctggtttggtgtcacttggttgctaaaccaagttgcgaagctcaaccctaccaagcgtgtcccagacctttccctcttgagacaacagttcgatctccctgatggcaactctaatctccctaggcttgatgtttttatcaacaccgtcgatcccataaacgagcctatgatatacaccatgaactctatcctgtccattcttgccgtagactacccaatcgataggactgctacctacctctcggatgatggagggtccataatccattacgagggcttgcttgagacagcaaatttcgcgacactctgggttccattttgccgaaaacatagcattgagccgagagcccctgagagctattttgctgtgaagtcgcgcccatacactggaaatgtaccagatgagtttgctgatgatcatagacgcatg

SEQ ID NO: 84 - DNA, 775 bp, Zea mays; identical to SEQ ID NO: 11

SEQ ID NO: 85 - DNA, 1674 bp, Zea mays
ccgggaggcccagccaaattttcgttcacctggcttcacccacccgcgtgccctcgccgacaactgagccaccgccgccgccgccctacccccaggtgcccaggtcgtttcggtccctttgccaggtcttcgccggcgacgagcaccagccaccagccagggaatataactttgacctgtaaaatgaggccagttttttgcgggaaccttgactatgatgttcgcatctctgaggtcgagcgccttttcgggaagtatggaagggtggaacgagtggatctgaagacaggaatatcatggagcatatgtgctcttcctggttgatggactggttctacctttactgcctctgcctgagcccccacctcatgcctggtccatctccaggagttcactgtccaccacggcatctgtgcacatggaaacgaccacctcgtgaccgatgtcttacttttacgatcaacactgcatcctcgtaccctgcctgatcaccattccttcgccaatccaaccatgccaatctcatgtctggctggagagtggagataagtggagggtttgcattcatctacatggaagacgaacgtgacgctgaagatgctatcagtagacttgatggaattgattttggcagaaaaggaaggagaatcaaagttgagtggaccaaggaggatcgcactgctgatcgaagaggcaactcaaggaggtctccaaccaatgcaaaaccgaccaaaaccttgttcgtgatcaactttgacccgatcaacacgagaattcgagatctggagaggcactttgataaatatggcagggtcgcgaatgtaaggatcaaaaagaacttcgcctttatacagtttgaggcgcaggaggatgctactagagcattggagggtgctaatgggagccatttcatggacagggtcatctcagttgagtatgcgctccgtgacgacgatgaaaaaggtgaaagggcgacgaacggatacagcccagacaggagaggccgcgaaagatccccaggtgcaagacggtctcctagtccttacggcagaggtcgggagagaggtagcccagactatgggagaggcaaggagaggggcagcccagactacggcaggggaggccgcagccctgatggcaggggaggccgcccagccggcggtggcggcggcggcagaggtgatcacgccaggggaggaggacgacgacgcagccctgactattatgaccgcgagcgccgagaagctagtcctggctatgacaggccccccagctgctcacctggaactgggagggacgcgagagactagaaaagcgccccatgcctgtgttgtagaattcaagcatcaaagcctcccgcgtcagatgaagttagagttggtgatgttagccagcaggaaactcgtttacttatgtgcgttagctcgtgctgactttgcaagttagcttaccatttcccatttgcgactccagaatgtaactcgtatggtctggaatggtagctttcaggactcgtttgaacctttcttggagtttttttcttcttttccggctaccttgattgccctgtgcatgcgctgatgaatctacagattgtttcgtctgtcaagtgttccgctgtaatgtaagagacgaaattatttgttccttgttgatgtagtccctgttttgtgc

SEQ ID NO: 86 - DNA, 1999 bp, Zea mays
attgggtacctcgaggccggccgggcctgaagccctggtcccgtcctcttcagggcctcgccgtcgcctcctcttttttcccccctcctcgacggctcctcctcacaggctcacagcctcacactcacgcggagagcgctcgcgcgggcgcacacgcggaggggacgttcacaggagggggagggaggagatgccggggagccagaacggggggccgaggcctcggccggtcaaagtcgagaccatccacgatcttgcgcgcgccggcgacctcgccggcgtccagaggaagctgctggagaacccctccctcctcaatgacaaaaatcccgtgatgtgtcaaacaccacttcatgttgctgctggctacaataatacagaaatagtcaagttcttgcttaaccagcaaggtacagaaacagttgatctggaggcaaagaacatgtatggggagactcctctgcatatggcagtgaagaacagttcttgtggatcaacaaatctactccttgaacatggtgcacacatagaagccaaagccaataatggcatgacaccattgcatttagctgtctggcatgcaattcaagctggagacttcagcacagttagcgtgttactaagctacaaccctgattgctttgtgaaagatgatgaaggcaaaatgcccttaaatcatattccaggaggagctggtagcgagaagctgctgaaactcctcactcatcatatggaagagcaaagaaaacggaaagctctcatgtcatgcctcgaagggaaagcaatgtcagagtttgaagaggcaatgtcacaaattgttggattgcaggagctaaaaatgcaattgcgccgatgggcacgaggaatgttttttgatgagaagcgacgggctatgggcttggggattgctaaaagggagagctccccatatggcatttcttggcaatccaggaactggcaaaactatggttgctcgaattcttggaaagctcctccacatggttggaattctccctactgacaaagtaactgaagttcagcgaactgatcttgttggagaatttgtggggcatactggaccaaagactaggaggaagatacatgatgcagagggaggtattctcttcgtggatgaagcttacaggttgataccaatgcaaaaatccgatgacaaggattatggtttagaagccttggaggagataatgtctgtaatggacagtggcaagatagttgtcgtatttgctgggtactgtgagccaatgaagcgagtcatcgcctcgaatgatggcttctgcaggcgggtcacgaaattcttctatttcgatgatttcagtacgacagaactagcagagatcctacatatgaagatgaagagtccaagtgactgtagcttgctttacgggtttaagctgcacccaagctgcagcattgaagccattggagagctgattgccagggagatcactgaagagcagaggaagcagatgaatggaggccttgtagacacgctgctcatcaatgcccgcgagaacctggattcgcggcttgatttcaactgcaacgatgccgatactatgatcacgatcacgttggaagacctggaggcagggcttcgtcagatttccagacaacgtcacctgcagtgacatgtaatttaggagaattttttctcgatgatctcatgcttgtctccaagggcgaagttatggctgtatcgtctaatccaacgtttttggcttttctgactgtgttgtatctagtcgttgctatatagcagtaaaatgcatgtggtatatacaattatacatcatgccctaacaatatttgacatctgtggaatagccagtaccacatacggatttcagtacgtgcataatcaattcagatttgacggttgaagtgattgaaaaaaaaaaaaaaaaaaaacccatgtttggtttcaatagtcttagggctttccaaaagtcttagaataaactttaaaaaaaggaagacc

SEQ ID NO: 87 - DNA, 1273 bp, Zea mays
cgctgaaccaaacaagaaatttttttttgccaaacgaaataaaatcaacaagcaagcatgggccgcttttttttttttttttttgagtacgataaagttgcagcacagctgcaaattaattagctatagcagttgataaactgtttaaatcgctaatatctaaacgacaaattcccacaaccttgtaacaccaaggtgtaccagaacgcaaagtctgtatctttggcaacagaaaagctgtggatacgctgatgtgcgtaagcagcctcacaaaaattcaccaagcaaaatggtgtccctcacccttggacccctacttcacagtaagaagcttgatgacggatgaaatcccgatgcggtgcagggccacaacggattgaccggtgttgcatagccccatcgtcttcgcattttcaatggcaaaaccaatagcttcgtcagtggcttcgttgtcaaaggccttggcagtggcggcactcagcattgggatgacacccctcacaatgaggctgtgccttgccggaccctcgtcactgcaggcccagtcgaacgagtctgtcttcagctcaggaaccacaacggacagaatcggcatggatggcctatacttggctacaagcctagcagtagttcctcccctggtcaggaccaagataagtgctgccctggcagagtttgctgtgcgaacagctgatgatgcaaggctctccaatggactcattggaattggagctgaagccatgattgatttgaaaatagcagcatggtctacgcaagactctgcttgcaggcagatcttagccatagtctgcaccgccaactctggataagccccagcagcagtctcaccactgagcataacacagtctgtgccatcaagaactgcgtttgcaacatccgttgcttctgcccgagtagggcgaggagacttgatcatagattccaacatctgggttgcagtcacaacaggcttgccttgaatattgcacttgaaaatcatcaccttctgtgcaaagaaaatcttctctataggaatttccatccctaaatcacctcttgccaccataaaagcatcagagtttgccaggatatcatcaaagttagctactccctcttgattctcaacctgcatgttcaaaactattataaccttgaatttgaaaatctactagtttgaaacccaaaagaaaatgctagaaccatacctttgacatcagcattatggacttggcatgctcaccaagtaccttcctaacctccacaagatccgaac

SEQ ID NO: 88 - DNA, 2856 bp, Zea mays
acgaaacatcgaactgttctcacagatcactctcaaactttttcacattttctctcaaaaagaagaaacagcgaaatttgtaattctcagtgacgccaaccctgactccgtttgacgcggctccgatggtcaccgccggcgacctcgccgctgccgccaactcctgagacctcgtcgcgcctaggccctaggcagggcgtgagcttgcctccgccgcgatccgggtaccagtcctcgaggatgcagtaccagcacgctggcagtcgaagccgcatgccgccattcgcgcgcggcggcggcgcctacagccgcggacggaagcagttctacccgccgtctcccctcccgtcggcggcgctgtctctgccgctgcagaacaagtatgaggtgctcatggaggcaggccgcctcgctgccgagtacctgttggcgaagggcgtgctcccaccgggctccctgcagcaacgcagcgggacagtcgtccctggagggtggggccagcttcctcctccgcctccgctttccgtgacttgggaagaccaagcttaccacggggccatcaatggccggcggcaggtcgatgatgagtgtggtattcgtaatgccagctcgcggcggaaccgtggtggtgactacagtagcagcaacagtagtaactacaatagaagggggaaaaggaaatttggggctgacaataggtattcagattgggcaaaggatagtgggaggaacaggcggtattctgatatccggagttatgatgacgatggtgacaatggggctcctgggttcaaacgggagcgccgaagcagtggtgggattgacgaggttggcagtagggtgtcgggggtggctggggagggaccatcatcgaaggtggaggcgatgggggagtcggagctggaggatactgggtcaaaggctagttctaacagcaatgtccagcagaaagctgatgcttcacaagaggcggaggatgaaaatgaggcaaacaaaatgcaggagaatagtgtggtgtctaattcagatgtagtcgagcaagctttgaatggtgaagataatagcaacaatgattcttctgatggtgttcaagagttagagacaaaacatttgccagtatcctcaggtgaaaaggtctcagatgggaggcctgaagatagtggtgttctgaatggcaaggttgaagatggcagtacttcgcatgagaaggctgaagatgacacaacgtcagaagaggtctccattatggagaacaatttgcctaatgatgttggaaatttgctaaattattgtaattttgcaagagttccaacaagaccacgatcagtgcttgcaaacaggaatgttgaaccagctaaaaaagaaattgatgtgtccgaactggtcattccagttactcctgaagaaatgtcccagatggcaatggatagagaagctaacaccaatttcataactaatgttgaggaaaacagtaaagacgagctcgttggtcaagaccaagaatgtgctgaagaaagtaatatctgcaatcaagtggcggaatcaatggcattccatgaaaaggaaacacaaggtgaaactgaagaaatggaagagcagaagaacatccctcgacattatgaagttgaggataataatgagactaatgaactgtctcctacatttgcttcttgtcagaataacttcagtttgcaagtggaaaaaggaatacaaatttacaatttagataccccgccacaagatgaagtgttgatcgatccacccgataaagggaagacagttgattcagagttatcacctaacatcaaagcagaagatgctgttacaatagaagaggaaaagcttggccagtctagctcatttaaaatacgtgatctcaacctggttggtagtccagaggttgccgacatgcgaggtgaccctcgtttaggccaaagcttcactgctggatgttcagtggacctacaagataatcaacaaattgaccttggaacagctcttggtaacaatccaaataatactgatacatgtaccccatttctgttgggaaacaaggcagttcaagttattgatatcgaagatgactcaccaattgaagctggtgcttgtgacacttcaaagtcaaaaggtgagatggtatattctagcatggagggctcgatgaaccctccggcaaacaacgatgctctacatggtatcccagatggttatagccttgcaatttcagattaccttggtgctgatatgtcatgctaccaatcaatacaaacagaacttcaaggtgggatgaacctaaatggttcagagggcataactgttatggatgattcaatatacagttctcttggtgacataggttttatggaggtttgggaccagcaacctcaagactatgagaagttcttctgaggcgctcgtgtccctgaaactgttctggagttcgactgataaatagaccagttacacttgcataggcagaaataaaacacctgatcgtgcctataaactggaaacccgtatacttgtgcgccagcatctgctctttcacttgtatgttccaggccatgcatattggggcttttgtacgggtgcatcctacgcgaagcactttcccttctgtaataccagggtctgcgtcggcagctcaaagagcagatattcgtatgaaacagttcttcagactccctgccttgcccgacagtggtgtaaaaagttgtcgtatagctgtcacgtaattcaaaggaattgacctaagcacgacatagtattcgtctgaaacatgtcttcatttataaacagttctatattccgaaatagaattgtttatttgttatatctatgttcttgatgcgctgt

SEQ ID NO: 89 - DNA, 847 bp, Zea mays; identical to SEQ ID NO: 16

SEQ ID NO: 90 - DNA, 752 bp, Zea mays; identical to SEQ ID NO: 17

SEQ ID NO: 91 - DNA, 1270 bp, Zea mays
gatcctctttagtcgacctgcagcctcttttggtggtatggctatgcaaactgagatgagggtacaatagggcatatgaaacttaattcctaagtaacaatgatgctaggataagattaaaaacttgttaggagtttagtttgttgcaagttgatctctttagtcctttccatgttattttatatggagatggaatgggaatattgtcatgactcgtgaatgtagcaccccctgagctttttgttttattgcactttctagttatctaggtcaacttttagtgaagatttttcatagaggtggatgtgggaatgtagaaagcatcagttctgagcattctagaataatatttatggcatcgtctttcttattagaaatctagatattgtaacagtcgttgacatataattgttaaataatgatacaaaccatttccacttgacgcgtccatccccctgatttatcattattattcagtattgtgttaaccatccacattttctgtattgtcacatttattgaggaagtagtaaagacaataggaaaaggcaaaatgacgagagatgagtgaatcaatcaaaatggctgttcatatttaaagtctgtgtttcactaaagctcgctcctattttgcaggcctatttctgatgcagttaatcagaatgatctaatggttattccaaaggtacctagtggtgtttctggtactgctttagctgcttctcttcttcgtgatggttggagtcttgctaagatctatgagaaataccaagaagctactgatgcttttcttcatgagaggcggggaaggagacatgcagaagcagttttggaaagggttttgcatgaaatagaagagaaggccgaccttatcctagatgaacgggctgaacatgagaggatggttgaagcttatgctatgatggatcagaaattgcagcaagcattgctggagcacgacaattttgaaaacaatgttaggaatctaaagtctgagctgaaaagacgggaacgtgatcatagcgtggcacagaaggaaatagatgacctgcaaaaacaagttgctgtccttttaaaagaatgccaagacatacaacttcgttgtggttctagccttcctaatgtaggttatgtcgcttcttcttcaagcttagtcaatgttctttccaatgtagagcatgatatcaaggacaatatgtcttttaaagacatcaacgggttagttcaacaaaatgttcaactaagaaatcaaattcacatgctctcagtc

SEQ ID NO: 92 - DNA, 740 bp, Zea mays; identical to SEQ ID NO: 19

SEQ ID NO: 93 - DNA, 920 bp, Zea mays
aggccttctggtttggtcggctactctggtcctctggtatccaagcgtcagactcagatccctgcagccacagcccgtgtgtcgccgacagcgtcacgaaccccctcgccgcttccaccgccgcctgctaccctgactcgcagctactccataccatcaaatagccagaggataccgatcgtcaccgcggacagattgttggaggctagaaatagcagggacggcagcgatatttattcgccgccacttacccctttgtcactgactgatttgtcccagcagcaaggaacgaaaactactgcaggtggcacaaggatgaagggggccttatgacataaatcaaccaaatgcagactgatcttagttgattttgtaagtagtgatgtattttaggttcatattcatgatattcttttattcatcgtctgtattacaaatgaaaaggacggaaaagtaatatatacttttcttacacagtagtgatgtattgtaggttcatattcattatatattgtttcattcaccgtatgtattacaaatgaaaagggcggaaaagtgcaagaacattgaacctctggttcagatctctgatagcgtcaagatgaaagggctgtttcctcagttccgttttgtttcgtttttggatgaattttccatttcttgacactacatgatttctttccagattgtatgggtggagagaaatgaaaccctgtacaaaattaatgatgcgggctcgtaatgtatgctgtccttgctattctgtctcgagaaaaatatgatgttccgtccctctggaataaaaaaacaaaaatgcatttagacatttcgggtacatgaattctgttttgagaaaaactggatgtggagggtttcagtaatcccagatttacatatttcgtccacgaaataatggactt

SEQ ID NO: 94 - DNA, 1225 bp, Zea mays
atggggatggggatggccggaatgttgttctgattctgatccatctcagcaccggccatggccacctggtatgccggcgcagccgtcttcttgatcccggtggtcttgttgaacacacgacagaccacccactcatcctgcgcggatttcatttgtaattaagccgtgaccgtgggcgggcaagcaaacaaagaaagtagtatgtggatgcatgcatcatggttgctgaacttgattgatatatattactggtaccacgcaccttgcaagccgaagctgaagctttcatcatggccgcagcgatgttggtggctgagccggatgcggatgcaggactagcagggagcctaccgctgccttcgagcctgtactcgtgcatcacccagttggttttgtcacccctgggagccctgcctttgtagaacacgagcgtcttcttcatgccgaccagcagcagcccttccgctgcaaggggatcgtagacctccttgtccttgccggtcgccttccaataacccgcctcagtggcccggttcgccctcagccccgtcgggtacttgcggtccttctggtagaagaagtaccactccttctcgcccatctttgcaacttctgcggcatgcatgcgatcgaaacaagcaccgtgtatcagtcagtccacacctagcaagatcactagcatgcctagtctagcactagcagcagcatccgctagctgcatgcacagatagatcgatcgatcgaggtcgctcgttagttacatactcgggaggtcccatggctcggtcttgtttaggtcggcgtccgcgatggcgatgcagctgtagtccctgtcgtgcaccttattcttgaggtagtggctgacaatctcaaagtcgctcgggtggaagcggaaccctggaggcagttcgaggccaccggtacggtcaacgtccatctcctgcggctgctgctgtggctgctgctggtccgccatggctcctgctccttcactgagatcagatcgatgaagcactaacaacaaccatttatatcaaggaacaattcgtagacgacagtataaaaatcgaaactttcatacatgcacaaacgcttcgttctcggcctgcccgggcggccgccggtcagtctagctaggtctctcactcgctcgctcgctcaccagaacgacggatgatgcagagctagcgagttgtgttctggtagtgcagtgagccacaggcac

SEQ ID NO: 95 - DNA, 1072 bp, Zea mays
gatcctttttagtcgacctgcaggcaaggcgcgaagcagctagagaaaaagagctagccatgcacaccgcggccaccaagcctctcctcgtcttctcgtcttcgttttcttcacgtccatggcggtcgtctcccatgcatcgtccctacgcttccaatacatcgaccgtcgtcacaacttcaccgccaagcaggcgagcacctcctcctcgtcgtccccgtcctctgcacacggcagccgcgaccgccgcccttcgttcgcgctagtgcgccgcgacgcagtcaccggctcgacgtacccctcgcgtcgccacgcggtgctcgacctcgtggcccgcgacaatgcgcgcgccgagtacctcgctagtcgcctgtcccccgcggcgtaccagccgacgggcttctccggctcggagtcgaaggtggtgtcgggcctcgacgagggcagcggcgagtacttcgtccgcgtcggcatcggctcgccgcccacggagcagtacctcgtggtggactccggcagcgacgtcatctgggtgcagtgcaagccgtgcctggagtgctacgcgcaggctgacccgctcttcgaccccgccacgtcggcgaccttctccgccgtgccgtgcggctcggccgtctgccggacgctgcgtacctccgggtgcggcgactccggtgggtgcgactacgaggtgtcctacggggacgggtcctacaccaagggcgcgctcgcgctggagacgctcacgctgggcggcacggcggtggagggcgtcgccattggctgcggccaccgcaaccgcggcctcttcgtcggggcggcggggctgctgggcctcggctggggccccatgtcgctggtcgggcagctcggcggcgcggccggcggcgcgttcagctactgcctcgcgagccgcggcgtcgtcggcgacgccgggtcgctcgtgctcggtcggagcgaggcggtgccggagggcgccgtgtgggtgccgctcgtgcggaacccgcaggcgccgagcttctactacgtcggcctgtccgggatcggcgtcggcgacgagaggctgcccctgcag

SEQ ID NO: 96 - DNA, 992 bp, Zea mays
aaaatcaacctcatcatattttattgtgtaaaattgtagaccttgcatagtatccatgcaatccattcatacatcgatgaaaaacaaggaacttgtctggtaaatccaaagctttgttgccgataatgcgactagaaggcagagccggaaaatgcgtctgcgtctggggttgctctgtatctagcccgggcagtttgatattgttctggtaaacatacagttccaaggctccatcatcccgaaaaatttttgctcgacaccctcgagagtgtagtggtcctacagactcttcgtcaacaagaacagcaataaccttctctttcccgtgcctaccatcaggaatctcaaacattgcttctgtcaaaatgccctccattatagaccgcagtcctcgggctcctgcttcttttgcgagcgccttctttgctatcatcctcaaagcattatcagtgaaatgaagcttgaccttatggaggaaacatgaacataaataactttcttggttataaattatcgtttaaagtaaaaaaaaatcggccaaatgttgcaattatttcgttggccaaaacgaatcacaaactaacatcattcattttgaatagcttcttgtattgctttcctattgcgtttttgggctccatgagcacctgcaaagagaatttctaatattttgaggtggtggaaatatttgagatggtaattttaagaaatattgctttaaattaaaaaatcaaagaaatttactacttgaaccaattgctcttcactaagattggtcaggccaactgttattggcaaccttccaataaattctgggatcaggccgtaggcaatcaaatcatcattttcaacctaagtgggaaaccatttgggaaaacctttgttgtcaatgcagaatcaaacaaaaattgtctaaaacaatgccaactgctgaagcaattgaacctacagtatcaatagaggaagattcctgaacagttctccagctgcag

SEQ ID NO: 97 - DNA, 2703 bp, Zea mays
  unsure (1)..(2703): unsure at all n locations
tgggtccctcgggccggccgggaattgatgccctttcccagatgaccgacactgaacatactgagcgctacattttctcgttcgagaaagccaagccagaactctgattctggccctcctccccatcgcgtctgtccgctacccctccccgaccagatcgctacgagacgccgcgcgatccgacccaggccgacgccgacgacccctctcgccgccggcggccatggcgtacggcgaccgcgtcaccaccttcgaggactccgagaaggagagcgagtacggctatgtccgcaaggtctctggacctgtggttgtggctgatggaatgggtggtgctgccatgtatgaacttgttcgtgtcggacatgataacctcattggggaaattatccgtcttgagggcgattcagctacaatccaagtttatgaggaaacagctggactgatggttaatgaccctgtattgagaacaagaaagcctctttcagttgaattgggacctggaattcttggaaacatttttgacggtatccagcgacctctaaaaaccatcgctattaagtcaggagatgtgtatattcctcgtggtgtttcagttcctgcccttgacaaagatgtattgtgggaatttcagccaacgaagctaggtgttggagatgtcatcacaggtggagatctatacgctactgtttttgagaacacattgatgcagcaccatgttgctcttccaccgggttctatggggaaaataagttacattgcaccagctggccagtacaacctgcaggacacagtgctagaattggaatttcagggcataaaaaagaaatttaccatgcttcagacatggcctgtgcgttcaccaaggcctgttgcatcgaagcttgctgcggatacacctcttctgacagggcagcgtgtactggatgcactattcccctcggttctgggaggcacttgtgctattccaggagcatttggctgtggtaaaactgtcattagtcaggcactttccaagtactccaattccgaagctgtggtttatgtgggctgtggtgaacgaggaaacgagatggctgaggttctcatggactttccccagttgacgatgacattgcctgatggccgtgaggagtctgtcatgaagagaacaacactggtggctaacacatcaaacatgcctgtcgctgctcgtgaagcttccatttacactggaattacaattgctgagtatttccgtgatatgggctacaacgtcagtatgatggctgactccacctcccggtgggctgaggcattgcgtgagatctcagggcgtttggctgaaatgcctgctgatagtggttacccagcttacttggctgcacgtttggcatccttttatgaacgtgctggtaaggtaaaatgtctgggaagtccagacaggaatggcagtgtcacaattgttggagctgtctctcctcctggtggtgatttttcagaccctgttacctccgcaaccctcagtattgttcaggtcttctggggtttagataaaaagctcgctcaaaggaagcatttcccatctgtgaattggctcatttcctattcgaaatactccaaggcccttgagtctttttacgagaaatttgatccagatttcattgatattaggacaaaagcacgtgaggtgttgcagagggaggacgatctgaatgaaattgtgcagcttgttggtaaagatgcgctggcagaatctgacaagattacgctggagacagcaaagcttttgagagaagattatttggcacaaaatgcattcaccccatatgataagttctgcccattctacaaatccgtttggatgatgcgcaacattattcacttcaacacattggcaaatcaggctgtggagcgggcagctggtactgacggccataagataacatacagtgtcataaagcatcggttgggggatctattttatcgcctagtatcccaaaagttcgaggatcctgcagaaggcgaagaagctttggtcggcaagtttaagaaactgtacgacgaccttaccactgggttccgcaacctagaagatgaggcacggtgaactgctgtagattttgtgtaagacaataatggctgccaaatggtttataaggtacggaagttgtagattgagaccatgtatgagaattttccccaccgctactcatttctttgccaccactattttagtcatcagtgctggatgggcaccctgtttatttcgacgtaccctttattgctagcattgtaataagcgatgggcatgcttgtagttgaataagtacaatgtccatgtattcaaacatcagcgtcatgtttatttgtttgttgaaaaaactatgttgcctttttggaaaaaaaaaaaaaaaaaaaaaaaaaaaaaaaaaaaaaaaaaaaaaaaaaaaaaaaaaaaaaaaaaaaaaaaaaaacccccnccttggggctttttgttttgcccccaattgggtggggggctttataaaacggagaaagggaaacacccttggcccgtttacttggggaacccaagggaattcccccttgcggaaccttgttgaaatgggaaggggtttgttaaccccaaatttaccggggccgatgcccgaaacccctcttgatatcccccgccgggggagcccggacttccccagggaaagggaggttttgggggggaac

SEQ ID NO: 98 - DNA, 1391 bp, Zea mays
agctcgagggccgcttttttttttttttttttctacacaaataatcatacacataaataagtatgcatacgcgcacccgcgtttatctgatggagggtacaattaacagatacaacaactgcattaacacgtacacccacagtggtgacaagtttaatttcttgcgattaattgatcgatgagcaacaccaaatgctgctgcaaacgcttgtgaaaaaaaaactcgccgtacagccacatgacatatatgtaggcgccaccacacacatggctatacatatatatataacagtttactagtcacgattattaataattatacaaacgctagagtagatttttttatctgagttggacacacatgatttactgcgtgcttgcgtgcatggattgttggccgaagattcttaatttcatcatccgagttggagggtcgttggttgcagctgatgggagtaatgctgaggctgctgctgctgcatgttcacctgaagaaagtttctcgagtcaacaaaagaggccatgtgatcgtactcgctcgtcgacggcactccaatcatgttcatcgctggctgccccgtttcattattattctcggcgatcttgctcctcaggtacatgttgtcagtctgcagatccatccttctttgcatatattcaacttcagcatacaagagctcattctttctagccctaatcttgtttatggccttctccagcttgccctccatctgcttaagctccctgaggcccatggtgtggattgaatctcccactatggtcctactagaccatttaaacaagttagactgcatatactactacaccttttgttgttgcgtaaaagaaaagccgaaacattgtatattagatttgtagaatttggtctaaatttgattgctgatacctgtttgcgttttgcaagctatcgatcgcctggcgcagcttggaggactcctgctggtagtgctgcaagttaaagtatggatatatatatagtcagtcatcaaataaagcttcttctgcttgttgtgatgaataactgaccttatgctgatttttagagtagtacagaaaattaaaagaacatgacagagaatgtttagacttgtttgagctgaggaactattcatgatatactagctgactagctagatgccaaatcactaattgttgtttgcatcagtgaagcacagataagctccttgcaaaaaagcccttaaacatttctcaattttattttacgtttaaacagttatgtatataaactgaatatctttggacagaatcgttatgcagccatttcctaggatttccccatatgaataccggcgtggtttttaaatcgacaacataatcatgcccataaaaagcaagtataaagagagagc

SEQ ID NO: 99 - DNA, 1155 bp, Zea mays; identical to SEQ ID NO: 26

SEQ ID NO: 100 - DNA, 408 bp, Zea mays; identical to SEQ ID NO: 27

SEQ ID NO: 101 - DNA, 412 bp, Zea mays
tttttgcaacggcaattcaatccatacgatttcttacgttgttcataaatcgctctcagattacaaaacagggatatcaagtacaattcaaaggaaaaagaattccagcgcagggacagggaagctggaagacggagcacgacactattgctggccctgtcggcgacgtacaggtgcggagaattgcatttccatccagcggctctcaactctactaggagaaaataacaaattttggtactgcaagcgctacaaaaattaagtacctttattttatcaaaatgattcctggccagcttcattgcatcggccgttccatttgacctcattattttgtacgagcgatcggttgaatccgaagaaaaaaaaagcgaattgcatgtgtgtatgctggcgtgtacttcccgcagat

SEQ ID NO: 102 - DNA, 2546 bp, Zea mays
tcgagctgagctgagcttaccaccaccacacacgggagatagctatagctagcatagccagtgagcgacttagcagcagctagctagccatgctgccgtccttcgcgtcgccgacggcgagcgccgcggcctcggtgacgcctccgccgcggccgataccaggcagctactggccaccggtgctgggcccgatacgggaccggctcgactacttttggttccagagccaggacgagttttttttttttttttattacaacttaaatatgtgccgttttttcctagcaagtacaccttatcttgcagcattgtgataccactattttttaaaatgaaaacaaatatgaaaggtgtggaccaatgacatggctgcctagcatggtggcgctgtcctcgtcggcagaatatggcaacgtgccggctccttgttgcttgtgtatgctgcctagcttggatgtcccacacgttccacacgctggacacttgttgtagtcgctgtcacgctcttgcctcgctccttcccggctacattacataacggatcggaaggtgatgatccatcgatggagctgtgagctgagctgagctgagctcaccaccaccacacacgggagatagctatagctagcatagcaagccagccagtcagcgacttagcagcagctagctagccatgctgccgtccttcgtgtcgccgacggcgagcgccgcggcctcggtgacgcctccgccgcggccgataccaggcagctacgggccgccggtgctgggcccgctgcgggaccggctcgactacttctggttccagagccaggacgagttcttccggaagcgcgcggcggcgcaccgcagcaccgtgttccgcaccaacatcccgcccaccttccccttcttcgtgggcgtcgacccgcgcgtggtcgccatcgtggacgccgccgccttcaccgcgctcttcgacccggacctcgtggacaagcgcgacatcctcatcgggccctacaaccccgggcgccggcttcaccggcgggacgcgcgtcggcgtgtacctcgacacgccaggaggaggagcacgcgcgcgtcaagaccttcgccatggacctcctccaccgctccgcccgcacctggtccgccgacttccgcgcgagcgtcggcgccatgctggacgccgtggacgcggagttcggcaaggacgacggcagcgacaagaagccctccgccagctacctcgtccccctgcagcagtgcatcttccggttcctctgcaaggcgttcgtgggcgccgacccgtccgccgactggctggtggacaacttcggcttcaccatcctggacatctggctggcgctgcagatcctgcccacgcagaagatcggcctcgtccagccgctggaggagctgctcatccactcgttcccgctgccctccttcctcatctggccgggctactacgtgctctaccgcttcatcgagaagcacggcgccgaggccgtggcctacgccgaggcgcagcacggcatcggcaagaaggacgccatcaacaacatgctgttcgtgctcggcttcaacgccttcggcggcttctccgtgttcctgcccttcctcgtggccaaggtcggcggcgccccggcgctgcgcgagcggctgcgggacgaggtgcggcgcgccatggtgggcaaaggcaaagacggcgagttcgggttcgccaccgtccgcgagggcatgccgctggtgcggtcgacggtgtacgagatgctgcggatgcagccgcccgtgccgctgcagttcgggcgcgcgcgcagggacttcgtgctgcgctcccacggcggcgccgcgtaccaggtgtccgcgggcgaggtgctgtgcgggtaccagcccgctggcgatgcgggaccccgaggtgttcgagcggcccgaggagttcgtgccggaacgcttcctcggcgacgacggcgccaggctgctgcagcacctcttctggtccaacgggccggagacggcgcagcccgggcccgggaacaagcagtgcgccgccaaggaggtggtggtggacacggcgtgcatgctgctggccgagctgttccggcgctacgacgacttcgaggtggagggcacctccttcaccaagctcgtcaagcgccaggcgtcgccgagcgtggcgcaggcagcagccgcccgccggagcgcagcagtgagtgcgctgtataggatccatcggtggcgtgcgacgtcgccggcgccggcgccggccaagcaataaagtaaattgagtaggccctcctcgtcatccacatgctcgtctgtgttcgacttcgatcggtgtctcttcctcccggccggccgctggccgccaaacagccgttgtggtaataaaaaaaacacttgtggaattgcagagtgtaccgtggtcacacacacttgtacattgaattctttagtgatgctgcaatcaaattgaattaacatgtactcgctcaaaaaaaaaaaaaaaaaaaaaaaaaaaaaaaaaaaaaaaaaaaaaaaaaaaaaaaaaaaaaaaaaaaaaaaaa

SEQ ID NO: 103 - DNA, 379 bp, Zea mays; identical to SEQ ID NO: 30

SEQ ID NO: 104 - DNA, 814 bp, Zea mays
atggagtcctcatggctcctcctgctctcgtgccttccggcagtatgggtgctttccgcgtcgccgtcgtcggcgccggggcgtagtcccggctgcgcgacaaggtgcggcgagatcgacgtcccgtacccgttcggcctggacccgcagtgcgcgatccacgcgggcttttggctcaactgcaccaccgtggatggcgccaccaagctgctcgacaagaactcggaggtgaccaagatctccgtggaggatggcaaggcctggttcaagaacttcatctcccggcagtgctacaaccaatcctcgggtgacatgttcgaaaacaacgcgtgggtcgactataccggcgagccctacgttctgtcggcagaggataataagatcatcgtcctcgggtgcaatagtatggcctacatgcagagcgactcttacataatcggctgcatgtcgacatgcgacgacccactgaagaacggctcatgctccggcaccgctggctgctgccaggcggagctcccgccgggcgtccagttttaccaaggcttcttcaactcgctgcacaacaccaccaagatatggaagcaaacaccctgcaactacatcaccgtgatggagagcgcggccttcagcttcagctccacctacctcaactcgacggtgttgtacgactccgacgacgggaggacgccggtcgtgatggagtggggaatcacacggcagacgtgcgaagaagccaaagccaacaagactgcgtacgcgtgtgtcagcaaccatagcgactgcgtctacagcgatgccgccggctaccgctgca

SEQ ID NO: 105 - DNA, 662 bp, Zea mays; identical to SEQ ID NO: 32

SEQ ID NO: 106 - DNA, 582 bp, Zea mays; identical to SEQ ID NO: 33

SEQ ID NO: 107 - DNA, 1333 bp, Zea mays
  unsure (1)..(1333): unsure at all n locations
acgaggaccggacgacgatgcgggggcggggctcctcgggcgcgcgcatgagcnangggnacgcggcggaggcggcagtnggcgcggtcgggtgcggctacgacctgacgggggncctccgcctgggccgcgccaagcctggtggccggctcgtggacctcgacggcgccgggaagtgggcggggacgtccccgtcgccgcgggagctggcgttccccggcggggccgccgtggcgggcgtgccggccggggtcgtcgccggcaagggcgagcgcgcgcggttccgctccgacgtgctccccttcgcgcagatggcggaggaggtgaaccgctcgctgtcgctgcccgccagcaagatcccctcgggcgccttcaacgccatgttcgactaccgcgggtgctggcaccgcgacgccgccgccacgcgcagcctcgtgcttcgacgcccgcctcgtcgagctctacagcgtcgaggccgtgcgcgccagcctcgccctcagggaccacgtcaggcgggacctcccgcccgtctgggaccccgccgcgctcgccgagttcatcgacaagtacgggactcacgtcatcgtcggggtgaagatgggaggcaaggacgtggtgtgcgtgaagcagctcaagggctccagcctcacgcagagcgacgtgcaggcccggctcaaggagctcgccgacgacaggttctcggaggattccacagcaagttccaattcttccaccgcgggaggcggcaggttgtcgcaggggctaaacgttgggcccggatcggccgcctggcagtccttcagatcacccgtcgtgtctcacaaggattcgcaggacatggtgtgcattcacgtcaggagaggcggcgtcgacagcgggcagggccacggcaagtggctctccaccatcaccggcttcccggacgtcatctccatgtcgttcgtgcccataacgagcctgctcaccggcgtccggggcagcggcttcctcaaccacgcggtcaacctctacctcagatacaagccgcccatagaggagctgcagcagtttctcgagttccaggtgcctcggctctgggctccagagttcggtcagctcccgctctcgctccagaggcggaagaacatcctgccgtctctccagttcaccctcatgggccctaaacttcacgtcaacactgccaaggtcgactcctgcctccgcccggtgaccggcatccggctgttcctggaaggcaagaagagcgaccagctgggcgtccacctgcagcacctgtcggcgacgcccagcgcgatcacggtgctcaagcgaggccgcgtcctcggcggacgac

SEQ ID NO: 108 - DNA, 1621 bp, Zea mays
gcagtgcctgcagcaacagcagcaggaatcaacgtggtcactggccactgcacattgcccaggattttctgtggatggccgggcccgggacagcagcatggtgagggggctcctgtttccaacgtctttccccgtaccaagttggcctgtcttgtgcttttacagctagctcgatttcccttttgtttgtttgtttgttttcgctacgaaaacgcatggtggtatcatgcatttcgtcctttcttacattactctagactgtacgaacgatttattttattttttcttccacacagctttgctcgaaagaatgcgtttttatattgaggattgctgccttacaacgcaatttcctgtctcgcattaatcagaagatcatataaacatctgactgttaagttttggcgttttttaccaggaaaactgtgatgctcttgttaccgtcgttagatttctatcactcgttcgtaacttccatcaagaaagaaagatttcttacactttggttctctgcatttatttgttattgttgtcatcgcgtacaggtgcgtacattggcgtgaacattggcacggccatgtcgtcggtgccagcgccgacgcagatcaccacgctgctccggtcgcagaacatccgccacgtgcgtctctacgacgcggacccggcgatgctggcggcgctgtccaacaccggcatccgcgtcatcgtgtccgtgcccaacgagcagctgctggccatcggcaactcgaacgcgacggcggccaactgggtggcgcgcaacgtggccgcgcacttccccgccgtgaacatcacggccatcgccgtggggtccgaggtgctctcggcgcagccgagcgcggcgccgctgctcatgcccgccatgcgctacctccagaacgcgctggtggccgcggcgctggaccggtacatcaaggtctcgacgccgcactcgtcgtccatcatcctcgactcgttcccgccgtcccaggccttcttcaaccggtcgctggacggcgtgctggtgccgatgctcaggttcctgcagtccacggggtcgccgctcatgctcaacgtgtacccttactacgactacatgcgctccaacggcgtcatcccgctggactacgcgctgttccggccgctgccgcccaacaaggaggccgtggacgccaacaccctgctgcactacaccaacgtgttcgacgcggtggtggacgccgcctacttcgccatggcgtacctgaacgtcaccaacgtgccggtgatggtgacggagaccgggtggccgcacaagggcgactcctcctccgagcccgacgccacctctgacaacgccgacacgtacaacagcaacctcatccgccacgtgatgaacagcaccggcacgccgaagcaccccggggtggccgtgccgacctacgtctacgagctgtacgacgaggacacccgcccgggctccacgtcggagaagtactggggcctgttcgacatgaacggcgtccctgcctacaccctgcacctgacgggctccggcgtcctgctggccaacgacacgacgaaccagacctactgcgtggcgcgggagggcgcggaccccaagatgctgcaggcatgcaagctg

SEQ ID NO: 109 - DNA, 961 bp, Zea mays
atcttgcatgcctgcagcaagtcgaagcgtccggcaaggcgcgggtccgcaaggcgctcccacttgcggcggtccaccagcggcgccgcccactgcacgatctcgcgcttgacgccgccggggagcttctcgagcgggcggcgcgcgctgacgagctccaggaggagcacgccgaagctgtagacgtcgcagctctcggagaccttcccccacatggcgtactccggcgccaggtagcccagcgtgcccttcacccgcgtcgtcaggtgcgacacgccgtcgggtatgagcttggcgaacccgaagtcggcgaccttggggacgaactccgcgtccagcagcacgttgctcgccttgatgtcccggtgtatgatgtgcgggttggcctcgtggtgcaggtagctgaaatgaacgaagacacggattcttaaggaaagtctttgattgcacttgcacggtgtcggtgtgtgtgcgcgcgcatgcatgatgactcacgcgaggccctcggcggcaccgatggctatggcaacgcggcgtgcccagtcgaggggctgatgctgctgggaggagggggcgccgcgctgggtgtggagatgcgtgagcaggctgtggttgggcatgtagtcatagacgatgaggcgctcgtcgccgccggcgtagaagccgcggaggctgagaaggttcttgtgccggacgcggccgaggatctccacctcgatggcgaactccatctccgccttggccgtcatcgccttcagtcgtttcaccgcgatctgaacaccgtaccgcacacatttgtcacgaatcttaatcacgagcttacgacatgtaattaaactgacaagaccatgaacagatatgtagtgcatgcatgcacctcgacgcccttggaggtgcggccccagtagacggtgccgaatccgccctccccgagcttgttgctctcgttgaagttgttggt

SEQ ID NO: 110 - DNA, 917 bp, Zea mays; identical to SEQ ID NO: 37

SEQ ID NO: 111 - DNA, 917 bp, Zea mays
gtcaattgtgtcatatatttgtaaacgaaggtattattatctatcttcatgaagtcaatagagaagttattcaactcctatatgattttggtgttccaactgcaacatgtcttctgctgttctgcaatcattcaaggatgaataatccatgctatttgaacctttatcttctcctaccaacttcagatctttgattaccaatcatcttaaatgacaccagaattcccgtggcaatgcaaggggaattcgtctaactatatataagcatgtgctccactttatttaaagcataatttacctttgatttcttatgtgcagtttttctgactctttctccttataaccctcctttttgaaggttataagattgtctgcagcaactcaggatgttccaaggtctgtgatttgtaatgttcatggagttaaccccaaatttattgagattggcaaattgaaacatcagcagctatgccaaagagagcaagcattcttcaagggtgcatattatatcggaaagatggtatggagtaaaggttacacagagcttcttcagcttcttcataagcaccaaatggaattgtctggccttaaaatggagttgtatggcagtggggaagatgctgatgaagtaaaagcatcagctgagcgactgagcttagatattagagtctatccaggccgtgatcatggagattcaatatttcacgagtgagtatttaatagatgaacaataactttttatacattcttactagctgctagattgttttatgttcaggtataatttatgataagttctttgtaccatcactttataatctttgagtctcgactgaactgtgttattgattccattgtctgtcccagctacaaggtcttcataaacccaagtacaactgatgtggtatgcacaacaa

SEQ ID NO: 112 - DNA, 726 bp, Zea mays
tactcacaccattatgtccagtggtgtcttcattcagctttgctgttttagtactgtgatcgccatggaacaggccaccttttctcaaccttttcaaagcaggagagccaaaaaaatcatcctcaactgtgttaccatcttcagcatcataattatcatcatcactatcctcattatacttaacttcttgcttctgcctgctagatctgcgagtttgttgacctggccctgccctattttcagaaggaccatgttttagaatctcttcctcactgtcgctactggtttctgatatgctagattcactggattcaaatgctgccctcctgccccttttcaatccagcacttgatgaagcttttgaaggtttcctggtggactgtgcagatttcattttgtttttcagtccacctgcgttaccatcagctttccgctttgtattcacattagcatgatgagaaccggtattaacatgaactcctgaagtggcagaccagcctttctgaccagtgacatttgattgaggtcctgcagagttctgtggtgtgcctgcatttttccaaaccccggcagatcgctgatttgccccggaaggaatagcttggtccttcaaatcatgtgcgataaatggcttcaaacaattctgacagcgcaaagccttcttcaagatcgagaggtagtactgatatctcatgccacaagctggacaaatagtccaaaatgttg

SEQ ID NO: 113 - DNA, 530 bp, Zea mays; identical to SEQ ID NO: 40

SEQ ID NO: 114 - DNA, 529 bp, Zea mays
tgcagatcgcgctgaaccttagctccaaccacttcaccgggccgctgccccgcgagctcgggcggctcgataagctcgtcgtgttggacttgtcgcgcaacgagatatccggccagatcccaggcgacatgagagggatgctgagcttgatcgaggtcaatctgtcgaacaaccggctcgcgggcgccataccggtgttcgggccgttccagaagagcgcggcctccagcttctccggcaatgccgagctgtgcggcgacccgctgaccgtagactgtggatcatcaatctatggctccagctatggaacggagacggaccacaggggaatatcttacagggtggccttggcagtcgttggttcctgcgtgctcatcttctcgctggtgtcgttgctggtggcgttgttcatgtggcgcgagaggcaggagaaggaggaggaggaggcgaagaagaaggcggcggaggtggcggtggcggcagcagccccacaggtggtggcctcggccgtgttcgtcgagagcctgca

SEQ ID NO: 115 - DNA, 781 bp, Zea mays; identical to SEQ ID NO: 42

SEQ ID NO: 116 - DNA, 728 bp, Zea mays
aagtttcacattattaagtctgattttcatatctcctgaccacaaaatttttcaaccgcattaccctttacattttattgcctttcagcaagaaagttaatattaaccttcaggacacaatgctaatactgaaccaatatttcatacaggattttgctgataaaatggcagtgacaacaattatagttcctaatgcactgaataatatgacagctacctatagactaaatgtgaaacataacactaaagctgagtagcaaattacctggaccagcagcacgttttttagatggtgtagcaggcaagccctcgatacgaacattctgccttgacactaagtcatcaagagatggcattggttcagccaaaagaccaaggcggtttatttctgaagcaacagatggcctggcaacaatcagtgagttatacaatgatgaacctttctcccatgccatgctttccaaaagctgttcttctaaggaatttaggtgccttttcaattctcttgggagggtctcttcatgtctcacaaagttctcaattattttgctcaaatcaaatgcagttagaccggtactctcaagaacagcaggaaacatcatgatgactgtcttatgtgtcgccaatactaagtccgctgaacatgcaatcaaacatcggtggaaacgctcatttgacagcaatggagttagattatttacattgctgttttgtaactccgctctgca

SEQ ID NO: 117 - DNA, 762 bp, Zea mays; identical to SEQ ID NO: 44

SEQ ID NO: 118 - DNA, 823 bp, Zea mays; identical to SEQ ID NO: 45

SEQ ID NO: 119 - DNA, 1900 bp, Zea mays
gggggcgacaacacgggtcaacaagatatagataggcgaattaaagcattacagctagctgcaaacgctttttattttttctttgcaacaaaacatgatgataaaacgtgtggggactccccttcccaagtgcgtcggtcgtcgtactgcgacaaaaacaggaaaagaatagtatatccgcccccatattgatcctccccacgtcgtcgcgctcgatctgcgcgtcccccagccctccccccaccccaaccccgccgcgacgaacccgggcggcgatcgctccagcgccgccgcgccagcgacctcaccccccgggagccgccggcggtacccccctccctatcacgcctcatcgaatcctcaggtctaagttttttttttgttttgtgagttatccaaagcttagccccgcaaagatgagtactgtctaatcgttaccatcacgtcttgtcaacttaagtgtgttttaggcaccgtaataaaatcgaaggttgccatgaccaacagtgacaacacgatatgtgctgcctgtggcgcatctgccgcctactgggcatctgctaatattcgcactgtttctttgcctaaacccgtggagaacttcacaggtcaattggacctgacatctcaaatgttttagcctgtaacttcggtgattcgtctcactcgtgatatccactccatgctagagggtgctggaaacctcatatgcaaattcaatttatgaggcttttcttccaaaagatcacccaaaacccaaaccagattcaacgatggaatataggacaaaatttataagagctaagtatgagacacaagattttttgaagccaagtttgcgcatttcatcaagatcatcttttaaatctaccacttctgtgaagagtgtagatagcaatttctctagcacttcaaggaaggtgatttcgtcaatctaccttacccttacaaatttattacaggaagatacaagagaattttgttggagatttgaatatcacactggtcaaaggtactaacttggccgttagagacatgctaacaagtgatccatatgttgttttaacactcggagggcagaaagctcaatcgacagttaaaaaaagtgatttgaatccggtatggaatgaagtgcttaagatatctgttcctcgaaattatggacctctaaaacttgaaatatatgaccatgatattttctcagcggatgatatcatgggtgaagcagagatagatctccaaccaatgatcacagccgccatggcctttggagatacttcacgtcttggtgacatgcaaattgggaggtggttcatgaccaaagacaatgccctgatgaaagatagcacagtgaatgttgtggcaggcaaggtaaaacaggaggtgcacttaaagctgcagaacgtagaatcaggtgagatggagttagagctagaatgggttccgatcctctagactaatgataactcccctgatccttttgtctaaaaaactatcctcaagatgcatcaaaattttcaagctgtccactttgatgatcttggacatttttgctggatggcttgaatttgttaaaaaaattgtcattgttaaatatcctggtgtaactgtcggttatactgcacagcctttcattttcccccctttggtaacttgttgtcatgccttgaaagtactcgttgtctcttgattgttgttgtattgccccattgaaaggacctgtgtcttataagagatgggcaattatagctagtgaactctttataaaaaaaaaaaaaaaaaaaaaaaaaaaaaaagaaaaaaaaaaaaaaaaggaaaaaaaaaaaaaaaaagggggggcccgtgtaaaagatccaaaatggggggggcggccttaaaaaaccaaacctttcttacgggg

SEQ ID NO: 120 - DNA, 874 bp, Zea mays; identical to SEQ ID NO: 47

SEQ ID NO: 121 - DNA, 1713 bp, Zea mays
gcacgagaccattacctagaacatcctaatcgaaaaaaaatcacttcaggtaagggcgaagaagagcattccctctcccggtctccccatctcccgaaccgcgtgagccaaaccctcccagctcgcgcgccctcgatggatgcctccgccgccacccccgcccccgggccttccttctctggcgccgagtcctccgcggccgccgcccagccgccggcggaggctccgcagttgcgcgtccacggcgccggcagcggcagcggcgtcgcgcgagcctgccgccaccacgcgtacagccgcaagcagaagtcgctcggccttctctgctccaacttcgtggcgctgtacgaccgggaggacgtggaggtgattgggctggacgacgcggccaagcgtctcggcgtcgagcgacgccggatctacgacatagtcaacgttctcgagagcgtcgggattcttgtgcggagggccaagaatcggtatacatggctcggattcgggggagtccctgctgcgctgaaagaactcaaggagagggcgctaaggaagatgtccggatcaccggtgttactgtcaatggaggactcgtctactgccaacttatcagatgatgaggatgatgaaaaattgggcgatgctgatgaagatgctgagagcgagaagctcagccaacctgttgacaatacgtctgataagcctgacgcacccagctgccgccttagatctgatcatcggaaggagaagtcccttgggctcctcactcagaattttgtcaagctcttcctcaacatggaggttgggacaatctcacttgacgaagctgcaaggcttctccttggagagggacatgcagacagcaacatgagaaccaaagttcgtcgattgtatgacattgccaatgtgctgtcttctttgaacctcattgagaagacgcagcaagcagacacaagaaaacctgcattccggtggctaggccaggcaaagcgaaagcaagataacaatgtcatggtttctgtacctccatcgatgaaggcaatgcccaataagagagcatttggtactgatcttacaaacattgacaataagcgaggcaagttagactcagcagcggagaacaaagtcaagctcatgcagggtgctggtaacatagtgaagacttttgagaggcagctggtgcaagggaaaaggagtgactttgtttatgggcccttccaccctgctggtgcaaagaaacacgaaactgatgatcaaactgttaagcagcaggagaggaagaacattcaggactgggaaaaccttgctgtgtccttccgtccacaatatcagaatcaagcactgaatgatctttttggtcattatgtggaagcatggaaatcatggtacgtggatcttacccaggaaacggcatcatgaagcagaatgttggcaggtcagttgtaacttgtaagccgtttccagtagttagatcaactgagttgttgatgcttgcttagggaaccaccctgtacaagatggaataaaaacacgaaggcaattttgtctttcgactgtatttactcgaatgctagaagtgaggccattttttcataaggaaaaaggcagggaaaatggggaatcgatcgagttatcaaattgttgctagtggactattctggagtcaaccgagttgtcccccaaccaaaaaaaaaaaaaaaaaaaaaaaaaaaaagaaag

SEQ ID NO: 122 - DNA, 780 bp, Zea mays
  unsure (1)..(780): unsure at all n locations
cttgcatgcctgcagccaagtagctcaagtacatcaaattcaatctaaaaggaagtgcagcaaatggcataagagcatgtgtgactgagtgcaaaagcgggaagagaagcttcgacggcagcaaatggcatacgagcatgtttgagacatgttttatcatcaaaagcggcaagagaagcagtgcctcacacctcttgtccgggcgaagggctccccaatgcaaaatcagggaaccgcttgtgttggtcacctccaggctaatctctgacaccaaaccctgcggcgctgggttcactgcgacctgttcccacacaatgcaccaatagtgttatagagataaaaatcgtagcagatgggtgaatgaacctggtatccagcggtcgcacctggagctcggagttggaatccagcgtgaactttccgataagctgcgacaagagcaacggaaagacatgaaaatgaagcaggcaaattgccaaacagtgggagaacatcagctgatgatggcccagcggcgaaagatagagcaggcatgaggtgcttacgtcgggggacgcgcggtccgcggacgtggcgacggcgcgcggcacgacggggccgcggctagaggcggagagcgtcgtggggcggcgctggcccccgctgcgtcggagggacgctggctgcggctgctgctgccgcttccctggcgaggaggccngcgggccgtgccgcggaacgcgagcgcgcaccgttcaacccgccgttggcgttggccgcggcacctggaatcccggacat

SEQ ID NO: 123 - DNA, 757 bp, Zea mays; identical to SEQ ID NO: 50

SEQ ID NO: 124 - DNA, 792 bp, Zea mays; identical to SEQ ID NO: 51

SEQ ID NO: 125 - DNA, 432 bp, Zea mays
tgatggacatggaggataaggtgaccggcctgtccactgaggtctccctcaaggctgatcagggttgtctccacatcactgtcaacaatgtccagccgaagcaatggtgggcagctacaagaagccatgtgagcagcaccagcccgtgttccagccgaaatcctctacggccgatggtaggaccagcgccttcatcaacaccgccactcacaagctgtgtttccccaagtacgacggctccaaagacccgttatcatggctccaccgctacgagcagttcttccgcgttgcattggatgcacccttgagccagagaaggtgtcccgtcctgggcacgttttgcaacctcgctgacatccgcttcaggctcccgacgcgcagcaatctcctgggcgagctgtgccatcttcgccttcagggattgctcaacta

SEQ ID NO: 126 - DNA, 635 bp, Zea mays; identical to SEQ ID NO: 53

SEQ ID NO: 127 - DNA, 1604 bp, Zea mays
aagggggcattctcgcggtgagtgtttttacaaatctgtacaggagtcaacgtttcaaggaagcgatgaaggacgtcatgactcagtgctgcagtcctgatgaagtcatctttggtcctgacttccatcagtctttgtactgccatctattgtgtgggttaatctactcagacgaaatccagtttgttttctcgccgtttgcgcacagcctcgtccatgcatttcacagtctcgaggaggtatgggaagatctatgtgctgacataagagatggtgttctctcaaagagagtcaccgcaccatctatccgccaagctgtttcgaaaatcttgaggccgaatcctgagctggctagctcgatttacatcaagtgccagagcttgagcaattggtatggggtgatcccaacactgtggccaaacgtgaagtacatctatggcattatgacggggtccatggagccatacctgaagaaattgagacactatgctggtcacttgccgctgctgagtgctgattatggtgcatctgaaggatgggtcggctctaatataaacccaaccctgccacctgaggaggtgacgtacgctgttcttcctaacattgcttatttcgagttcattcctctggaaaaaccaaaatgggaggaaacggagatctgttcctctgttcactacatagagtcggagcctgtaggcctaactgaggttgaggttggcaaaatctacgaagttgtaataacaaattttgcaggtctataccgatacagactgggagatattgtgaagatagcaggcttccacaacgcaacaccagagctccagttcatctgccggagaagcctagtcctcagcgtcaacatcgacaagaacacagagaaagatctgcagctggccgtggaagccgcggagaagctcttggccgcggagaagctggaggtggtggacttcacgagcctcgtggacaggtcgagcgagccagggcactacgtcgtcttctgggagctgagctccgacgacggcgccagcgaagacgtcctgagcggctgcgcgagctgcatggacctggccttcgcggacgcggggtacgtcgggtcgaggaagacccagaccatcggcgccctcgagctccgggtcctccggaagggagccttcgcgcaggtcatgaaccactacctgagcctcggcggcgccgtcagccagttcaagacgccgcggttcgtgggccagtccaacagcaaggtgctgcagatactgagccggaacgtcacccggagctacttcagcactgcgtatgggctctgatcgacgatgctacggcgctacgcaccaagtactggtaataggctggaagtatagtgatcgagagtgcatggcgcacgacgacgatccatcatgctgggagcctgggagttgcacgacgactgacagatgtatcatataattgtcagtgtaaatatagctgttcgacagtgtatgtaggcgaaggttgctgcgttccgtttagcagccgtgtcatcgctcaagaaaactcagaaagatcacatgtgttctgatttctgaatcaaaaaaaaaaaaaaaaaaaaaaaaaactcactcgatcaa

SEQ ID NO: 128 - DNA, 560 bp, Zea mays; identical to SEQ ID NO: 55

SEQ ID NO: 129 - DNA, 485 bp, Zea mays; identical to SEQ ID NO: 56

SEQ ID NO: 130 - DNA, 508 bp, Zea mays
tatattcttttattgttattttattgaagtctttgcggcgcatgaatcatcctaacattgtgaagctcaaagaggttatcagggaaaatgatatattatacttcataatggaatacatggtaaatatgttatgtatagcaaatattctactgcaccattattgtgttcttgaatctgaacccttgtttttataggagtgtaatctctatcaacttatgaaagaaagggtcaagcctttctccgagtctgaagtccgcaactggtgttttcagatatttcaggctcttgcatacatgcaccagaggggctactttcatcgtgacctcaaacctggtaggatctcagtgttctcaacaatcagctagatgtttgtttccatagcatataaaaaatggttattttagtcatcaaatgattaccaatttacaactctgactaccagtctatataatattgcaatataggtagtgtagtaaactcacgtacaccttgtacatatccgccctca

SEQ ID NO: 131 - DNA, 1039 bp, Zea mays
ctttgtaagtgtatgtatagctgaacatgttttcttttaccaggatttgacgctgcttctttgtacctctggtagagatcctggtataatacctcggaatactcatcctcctgaacctgaatccattgatgggatcaatgatacaggtgttcagactccacaacaatttcgtttgcctcgcacaaaggaagttgttgtaaatgggatcagtgtacgggtaaaatactgtgatacttgcatgttgtaccgaccacctcgatgctcacactgttccatttgcaataactgtgtggaacggtttgatcatcactgtccatgggtcggccagtgcataggactgcgtaattatcggttcttctatatgtttgtatcctcgacaacattgctctgcctgtatgtatttgccttctgttgggtgtatgtgatcaagattagagcagctgagcacttgtcaatttggaaggccttgttgaagacaccagcatcaattgttctgattatctactgttttctttgtgtatggtttgtgggtggtttatctgtcttccatttgtacctgatgggcactaaccagacaacatacgagaatttcaggtatcgctatgaccggcgcgataatccatataacagaggtactctgaacaattttctagagatattctgcaccgctatccccccttcgaagaacaatttccgggcaagggtgacagtagagcaagggctgcagcaaacgcgctcacagtctaggggtttcatgagccccagcatgggcaagccaaccatcggagagcttgagatgggcaggaagccagtagtaccttgggacgagccaaggacggcagctgatatcagggacttggaagcaggccacgcatccccagatctgagcagagatctcccagcagagtttgtggaagggcgaactggcatgcactcgaggcagtcaagtgatttacaacaaaagcttcacaagagaaaaaactcacaacgttctttcatctctattgatccaactttccggctatcaacaaacctacag

SEQ ID NO: 132 - DNA, 2343 bp, Zea mays
gccggctctccaggcgaagcccgagctgcgagagctcccctctccctgtctcctcgtctgtgactgtgcgccgccatcgcccgtcgaccagcgccgtccgcccgctcgaaaactgagacgcacgctgcccgcgcatcgccgtggcctgctccagtctgtggaaaagtgacgaaccaactcggggaattctactctcgaggccgccacctccgcctccgcctccagccctccaccgacttaactgtctggaactggaagtgtaccactactattcaattggccctagccctcgcatagcacgatgccgccgccgctgcttgagttcgcgatcctcgccactgcctgcaggttcagcaagccccttaccgttctcaggaggcttggcgttcttggcccaccaaccgttcgacgcaatgccgcagaggcgttcgtgccttcaccgtttcgccaggttgtcgttcagagtggaaagcttcttgggacaccaaggttctgccacaccactgccggcatgtcagaatgtctcccggacgtctacgccagtcaggtactgaaggttctcaagtccaccagtgctgacaacacggatctcagcggtgctcttcatcagttcgcggtccacatggatgaggatattatcctcatggtcctccagaagcagcggtccaactggcaggtcgccctggcattcttcaactgggcggcaaccctgccggggtatgcccacgggtcaagggcctacaccgagatgctggacattcttgggcggatgaagaaggtcagacacatgaggcagctgtttgacgagattcctgaggagcgacgtcaggtggtcgtgacgaataagatgtttgccgtgctgttgaaccggtacgctggtgcgcacaaggtgcaggaggcgatagaggtgttctacttgaggaaggattacgggtttgagcttgacttggtcgggttccagatactactgatgtcgctgtgcaggtataagcatgtcgaggaggcggaggcgctgttccgtgagaagaaagatgagttcccgcatgtcacaaagagctggaacattatactaaatggttggtgtgtcaagggaagcctgagggacgctcaaaggatttggaatgatatcattgcatctaaggttgaacgagacctattcacctttggtacgttcataaacgcattggccaaaaatggcagaattagtgccgcggtgaagctgttcaaacagatgtgggagaaagggatcaatcctgatgttgcgatttgcaattgtatcatcgaccagctgtgcttcaagaaaaagattccagaagcacttgagatttttggtgagatgaatgaccggctttgtcaagccgatgtggctacctacaacactttgataaaatacatgtgtaagataaaaaggatggagaaagtttatgaacttttggatgacatggaagcaaagggctgccctccaaacaataggacatactcctacattctgaagacgactgagaaacccaaagatgtcattgccttgatgcagaggatggagcgaaccggctgcaaattggattctgatatatacaacttgatattgaacctttatatcaaatggaaatatgagaaggggatgcaacagatatgggatgagatggagagaagagggtcaggcccagatcagcggtcgtttactattatggttcatggtcttcattcccaaggcaagctcgatgaggctctgcagtattacacaacaatgaagtctagagggatgattccagaacctaggaccaagatactggtgaaagctatgcacatgaagaaggacggggctgccactgaagatgactcggcaagtatggcagggaagcatctaaaattggatcatcgttcaagactattcaatgttcatagatagtctgcttccaggtctttgttctataatctgagcaggggatgctgtccatataggtttatgggttgaaagaaagaaaaacagttcttttttctatgggtgtctaaatcacaatggctgcaccttgggctaaaaagaatcatcagcatagattcattggcaatatgatttctcagtaacttttgctcagactttcagtgccaggatcatcagtcagctgtgaaaacgttttcctagcaggtgaaattgggagttcaaggtgcgtaccgatatccaaatttatttaatgtgttgcgcaagaaacaaacaaatgtggtgggagcacttaaattctacaccttttaatgtggaatggcaaagttttatttattagattaaacaaggatatggatatttttatctagaacctaaataaaaacggcttgttctctaaaaaa

SEQ ID NO: 133 - DNA, 1041 bp, Zea mays
agtaattaattgaggtcaagcacacccgtccaattgcgatcactggcaggcgcgagagacgaacggtgtgttgtgttggtctgtcttgtcaccgccgactgtttctatctagtctagctacaactgctgcttttctcgcttgtcaggccagcccaatcgtcgttggcgcggcgccagcagaagcggcgtcatatgcagcgaaatcattgatgccgatgccgatgccgatgccatcatgcatgccgcttgccgcctgcaagctgcaaaccctgcatgctaatcagtttgctttgctctcaggcatcacgcagactggcagcgtagatgaaccccctgctgctggctgccgcagacaagatggatccatacgaatgaatacaacagctgctacactactattccctggcaaacgcattgcagccgcagtactgctcctttggagcttccctgtcttgatcgggtggcgtcactcgttccatacttccatgggctgctagctgaacgctagccgacgatcacgactagacctggtggtgctcctgatctgtactgtacttcttttttgagcgaaccaacaaagcggcgagaagctctccaaaataaagccgctcgacgtacgcgacagcaacgtgtgccccctcgccgcacatctgcgtccaccaccgcatagcatcatcagtcggcatcatcattggatcgaactccaaagctagcactgcaggatgtacacatatatatataaacatcgtgagggagttggttgcatgcagtcgtcttgcttgcaggtagcgaggatcacacacacacacacacacttccttcagtgcgcgcactactacctgtcagtgagtcactcagtcagtcagtcagtcactcactcgcttcctcttcagttcgttcctctcgagaaccatatcccttttaattcgcatattctccctgcgtcgaacagcgcctttgcatgcgtctccgatcccttccacaccggctgcgccgccatctccggcgctagcgctactacggagagagatagcatcagct

SEQ ID NO: 134 - DNA, 635 bp, Zea mays; identical to SEQ ID NO: 61

SEQ ID NO: 135 - DNA, 2255 bp, Zea mays
acaaggtgtacgcgctcgtgtggttgctgcccgaggacgaggacgcggagaagcgcgcgcaggcgcgggtccgggacgacgaggacgcggagcgccgcgacggcgaggacggcggcgccatgaggccgctcgcacggacgccgcacatgttctgcaagacgctcacggcatccgataccagcacgcacggcggtttctcagtgccgcgccgcgccgccgaggactgcttcccgccgctggactacagccagcagaggccgtctcaggagctcgtggccaaggatctacacggcacggagtggaagttccggcatatctatcgaggtcagccacgaaggcatctcttaaccactggatggagtgcatttgttaataggaagaagctcatttctggagatgcagttctcttccttcgaggcgaagatggagtgcttcgactgggagtgcgccgagcagcccagctaaaaattgtaactcctattcctgcacctcataaccagtgctcaagtaatagcaatcttggaaacgttgcacaagctgtggccacgaagactgttttccacatctactacaatcccaggttaactcaatctgaattcattgtacccttattggaagttcacaagaagcttcaatcaaccaatttctgttggaatgaggtgcagaatgcgatatgaaagtgacgatgcttctgaaagaaggtgcactggtataataattggaagcagagaagctgatcctatatggtatggttcgaaatggaaatgcttggtggttagatgggatgatggtatagagtgccgttggcccaatagggtatctccttgggagattgagctcacaggatctgtttcaggatctcaaatgtgcgctcccagttcaaaacgtctgaaaccatgcctcccccaagttaatccggagattgtgcttccaaatggaagtgtttcttcagattttgcgggatctgccagattccacaaggtcttgcaaggtcaagaattgttgggtttcaaaacccatgatggtcctgctatttctgcttctcaggcaactgaagcaagaaatttgcagtacagtgatgaacggagtaacaataacttagggatcccaagacttggtgttaggtctccaactggaatccctgggtttccctaccattgctcaggctttggggaatctcaaagattccaaaaggtcttgcaaggtcaagaagtgtttcatcctttccgaggaggatgtttggctgatggccatataagaactgctggcatgtatcaacctgacggtaggcatgtatctggtgcagcttataaatggtctgcaccacaagggtatgatttcccacagccagcaaaaccgttttttctgttgcaagaatcatccccatcatctgtgatgatgtttccacaaactagatctaagataactcacttggaatatgagtactcaagacatgaggatggtagacttgataggactgttcctactcaagacatgggaagaagcaatcaaacattatctctttggcctcatcttgtttcaggcgaagcaatagaagaatgtactggaactgtgaatatgcactcccccgtcagtggtgcagagcatgaatcaaacaatgagagtacagttgaaaatggctgcaaaatctttggtatctcattggctgaaaagatccgatcatgcgatgaagcagactcttgtagtgcaaaatgtaattctcggctccagcctttgaagtcacaaatgccaaaatcgctaggcagctgttgggccactgttcacgagcaaaggcctgttgttggcagggtggttgacgtctcggcgacggatatgatgatctgatccacatggcatatccttgtagaatatgcaggaaggactaccgagtgcaactttcatggcctgaaccacatcctggatgaaagattgctgaaggtgaccttatgattcttgaaacagggatgtttgacaaatttgtaatgtacttttgggctttaagtatcttattatcttaagctacctagtaatcagcacttgtaccttaaggtgtgcgttatggcaagttcttttagagggcttgtttggactagcaccatctcccaagtactcgtcgcattgtttctttgccccgggaaacaagtccgttttggaagtttggctccagtcctgttggtaccatttgttgcatcgtgtgtgcttgtacaattgcacatctcaagcggtaaagcatgatttgaccagctaaaagggga

SEQ ID NO: 136 - DNA, 637 bp, Zea mays; identical to SEQ ID NO: 63

SEQ ID NO: 137 - DNA, 1029 bp, Zea mays
cccttccccgtcgcccgccaccgctcccacggcccccactggggtcccttgggaaggacgcccccaaggatgagaccgcggacaacgacgacgagatggacatggatgagacagactaccatcctgtggcagctgctgcagctggtccttgtgaagggaggaaggagaagaagggcatggattttagccggtggcgtgagtttgttggcgatgctccccccaagcggaggcaggggaagccagtgcaggccaagaaacagagcgatcagagaattgatgctggggctgtagcttctaaggtaggtggtgtggcagctgaggggagaggattggagggaggtgctatgcggcttgacagtggaaatgctagcgaagggccaggtcccgtgcttttggtttctgatgtcgtgtccaagaagccaatgagtcaggttgaatcgagagatgaattggtgaacacaagtgaggctaggaatttggcatcacaagcagagagtatggacctcgacggcagggagtcatctatggaagcagagatcagcgcagagaacatggctaggttggctgggatgtctgcaggggagattgcagaggcccaagcagatattgtaaataagctgaaccctgcattgctggagatgctgaggcggcggggaagggagaagtctggaggcacgaaggatgtgggtaaggccaagggtctgaaaacctcagggctgcagaagaataaaagggctacaccaggggattggttgactgctggtgaacatactgggcactcctggaaggtgtggagcgaaagagtggagcggatcaggtcttgtaggttcacattagatggagacatattggggttccaatcttctcacgagcaccaagatggcaagaagatgccttcagaaagtgttgctgagcgtgatttccttagaacagaaggtgatcctgcagctgttgggtacacaatcaatgaggcagtggcacttaccaggagcatgcttcctcaaattataggttccggcgacagcaacg

SEQ ID NO: 138 - DNA, 621 bp, Zea mays; identical to SEQ ID NO: 65

SEQ ID NO: 139 - DNA, 1327 bp, Zea mays
ccggccaaaaaaaaaaaaaaaaaaaaaaaaaaaaaaaaaaaaaaaaaaaaaaaattctcgcaggccgccccgcgaccacgccgcggttttgcgcttctcgacttctcgccttctctaatctctttgcctccctccaccaccagtccaccaccactgctacccaaccctcgcttccccaaaccctagccaagggacacggtggccggcgatggacggcgacggaggaggcgctggtgcgctgcaccaccacacgcgctcacccgaggacgtcttccgcgatttccgcgcgcgccgagccggcatcgtcaaggcgctcaccacggatgtggagaagttctatcagcagtgcgatccagagaaagagaacttgtgcctttatggtttgccaaatgagacttgggaggtcactcttccagctgaggaagtacctcctgagcttccagaaccagcactggggataaactttgcccgtgatggaatggtcgaaaaagactggttgtctctagttgcagttcatagtgatgcatggctcctgtctgttgcattctattttggagctcgttttggatttgacaaagatgccaggagaaggctcttcaccatgattaacaacctgcccactgtttatgaagttgtgacgggggttgctaagaagcaatcgaaagcccccaacggcagcagcaaaagcagcaaacctaactctaaaccatcaaaactgaccaattctaacagtaagcccgcgaagccagcccacccaaaagaagaggaggacagcggccgggaggacgcagaggaggaccaggcgtacctgtgtgggtcctgtggggagagctatgcgaacggggagttctggatctgctgcgatgtgtgcgagaagtggttccatggcaagtgtgtccgcatcacccctgccaaggcggagcacatcaagcagtacaagtgtcccagctgcagcaccaagcggagccgagaatgacggcaccctgggaacaggacctgctcccagttaacggaagcattttagaatcattaggagctatgaagcggtgtcattagaaccgcttcacctgtttagcgtaccggtgcgcgtgccggctgttgtatcttctctcgacgtgtgttgtaaactgggcagggacatggtagctagtggtgatgtgttgtgttagcaggctgactgctgtcatcgtagtgacggatgaactgctggcgtttggaaactcgtgttcggtaattaagtgctgcttagtgtgataattacagccggtttaagtgctgcttagtgtgataatttcctcccggtttaaaaaacaccccccccccagcc

SEQ ID NO: 140 - DNA, 231 bp, Zea mays; identical to SEQ ID NO: 67

SEQ ID NO: 141 - DNA, 368 bp, Zea mays; identical to SEQ ID NO: 68

SEQ ID NO: 142 - DNA, 582 bp, Zea mays
attccgcctctattagcatgctgtgagtatatattatatagaaaaagaccacgagagaacttcgtccgaggctgagctcagcatatataatttggtaattaacgcgacgtacgtgtgctgcatgcagggcgatccagagggcgaactgcttccacgtggaggggcacggggacccctgcaacatctccagcacgccctacatgatcatcttcggcgtcgtgcagattttcttctcgcagatcccggacttcgaccagatatcgtggctctccatcctcgccgccgtcatgtccttcacctactccaccatcggcctgggcctgggcatcgcgcaggtggtgtccaacaagggcgtgcagggcagcctgacggggatcagcgtcggcgcggtcaccccggtcgacaagatgtggcgcagcctgcaggcgttcggcgacatcgccttcgcctactcctactccctcatcctcatcgagatccaggacaccatccgcgcgccgccgccgtccgagtccaaggtcatgcggcgcgccaccgtcgtcagcgtggccgtcaccacgttcttctacatgctgtgcgggt

SEQ ID NO: 143 - DNA, 716 bp, Zea mays
gttgcatcattggagtgtttaaactggtaggtcggtgtccttgtcgaagggaaatggctccaattttggctgtgctacttctaggatttcttcaattggtatctctgcctttgatctttccaatggtgcaactggatcgacatttggattataatcctgaattttttatatatattctgtcagcatgtagctcaaacataaatgtgtccaattatgaatgtctagattttcaagggtgttactcaccaggttagcatgcattctcctgacaaaagttttgaaagtggtgtagttctgttcctggaacagttcatcagatactcggaggtaggtgaatccgtgcaacttgtgttctggagggccattcttgttgatgccttgaggtcttgcattcctgaggatggtgttgtaagctgttgcatcatatcggttgagtgcattttcacatgccaaatttaggccctctctccatccggcactcagcacctgccattttttatagtttgcaccagaatattttgttaatgattgaaaagtcccttttgtgttccttaaaaggagaatacagacaagtgaaaatggcttaaacctgttgaaccagttcctcaggtgcacttttcgcctctgaactctgttcactgtccctcatctcagcacaagtgaagttcatgctagcacgatgccttgtgagcatgtgtgctatggttctgtacctt

SEQ ID NO: 144 - DNA, 741 bp, Zea mays
cgcaccaagaaaaagtaggggagaaggtatttgcatctaccatcgtgtttatttaaccccatcaggctttgtttggataaagagggattgaagtggattgaggtattttagggattgaaaagaaattagttcatattacacttcaatacaccttataccacctcaatccaagattacccaaacaagccctcactttatttagacagggttggtgcccttttgtccattagccttctgaattactcatgtttgtttacagtggagcacggttgcaaaactccaggaagagtgggtggaaaatgcagaccgctgggtggctggtttcttagagaagtttgaggaagggtgccactcaatggtcagttaccctctgaccacccttcgcagagagtccactgctttcgattaggagtccactgctcatttatgtattcttgtttccaaaacttcctcaggggacagccatcaaggagaggatccaggagaggctcatcaaggcacaatccagcgactttggcagcctcctacagtacgacagctacgattctgatgaagccaaagaaaacgacgaggacgaagacgaagatgaactctttgaagacgtcaaggaatagcacctccgtacatatacaatggttttgtagctgcaaattgtgttgtgagtcagttgcctctctctggttggtgatctttatatatggtctcaaaggtaggtcaggttgcaatgtttgtagctgtttg

SEQ ID NO: 145 - DNA, 1286 bp, Zea mays
atatccactattctctaggaagcaagggaaccacatcgccatggcagccaagatgtttgcattgtttgcgctcctagctctttatttgtgcaaccgccactagtgctacccatatcccagggcacttgtcaccactactgatgccattggctaccatgaacccatggatgcagtactgcatgaagcaacagggggttgccaacttgttagcgtggccgaccctgatgatgcagcaactgttggcctcaccgcttcagccgtgccagatgccaatgatgatgccgggtatgatgccaccgatgccgatgatgccgatgccgagtatgatgtcatcaatgatggtgccgactatgatgtcaccaatgacgatggctagtatgatgccaccgatgatgatgccaagcatgatttcaccaatgatgatgccgagtatgatgtcttcgatgataatgccttcgatgatgatgccgaccatgatgtcaccaatgatgatgacgagtatgataccaccgatgatgatgccgagcatggtgtcaccaatgatgatgccaaacatgatgacagtgccacaatgttactctgattccatctcgcacattatacaacaacaattaccattcatgttgagccccacagccatggcgatcccacccatgttcttacagcagccctttgttggtgctgcactctagatataagcatttgtgttgtacccaataatgaagtcggcatgccatcgcatgcgactcattgtttaggaataaaacaagctaataatgacttttctctcattataaaaaaaaaaaaaaaaaaaaaaaaaaaaaaaaaaaaaaaaaaaaaaaaaaaaaaaaaaaaaaaaaaaaaaaaaaaaaaaaaaaaaaaaaaaaaaaaaaaaagaaaaaaatattcaataaacaccagacccggggcccaaggttcctaccccccttaattcgcctctcccttttcccttcacagtgaggaaccgatccagaaaggatcgagctagaaaccaaaataggggggaaaatgggacgccaaagcatgttccctaaaggggggtagtgcccacaaagggggggcgggccccccccccggcccgggaggcagaaaaccccaaccgggggcgctaactaaaagggagttggttaccctcactggggcgtggcccccatgcccgatttaacaggcaaaaaaacctgtcccgcgggaaactttaaggggccccttccctggccgccccgccccctttcttccttttttttccccaacccccaaaaagaggc

SEQ ID NO: 146 - DNA, 1709 bp, Zea mays
tcgcgtcatacgactagttcactggcatggtagcgcgttcttcatgctcctggcgtatttctctagcctcttcaatccttccttgggagaggctgcttcgcctaactgtctcaccattgcgctaccaatgatcacaccatctgcaccccactctgcaatctgtccaggtgcaatatatatactgttagaatttgttactataaaaaaaatatgtgaataagtttttgaggcattttttttaaaaaaaaagttttgcctacctgctttacatgctcaggtttcgatatgccaaacccgacagccacgggtatgtcagtgacctgcagcaaacaaaaaaacacaagccagccagccagctcagtgattgtgattggtaacaacaaaaacgaataaaaatggcatctttttctctctccctctcttttctctccttttcctttggcaagacgccaagacgtattattacctgtttaacctcctgaatgagagactggacacgtgtgttcacgtttgcgcgtggacctgtaactccattgacggtcgcctgtgatggtcaagtaggatacatgagcatgcatgcatgtcatcggccggcaagttcagtcgctagcaaaactcctggacggaaagttttgtgtcacttacgagatagacgaatcctcgtgaagctcgtgttatctcccccatcctgtccgctggcgtagatggtgttgtgagcagcacctgcatgcgttcagccattgttcatgtcgtgagacagacgctgctttctcaattttatattgcgcagaagaactagactaggagacgacgccacgtgcttctccttgataattgatgtcacataccagctcgaggctgttcttgatggcttcggtcctgagagtgagagcacacgagttcccatacgggaggtcgggaactatgaggccgtgcacgccggcttccttgacggcggcggcgaagtcggccaggccccaccgcacgatgggttgaagtaggagaagagcaccacggggcaggacagctccggcgtcacccccttcagcatcgccagcacgccgtccggcgtcgtgccgctcgccagcgcccgcgccgccgacgcctggatgaccggcccgtcggcgtaggggtccgagaagggaacgccgagctcgatgacgtcggcgccgcaggcgtccaggagccgcagcgcctccgccgtcgtcgccaggtccgggtcgccggcggtgatgtacgggatgaacgccgtcttgccctgcgccctgagcctggacatggtctgcgacaccggcaggcatcggccgccggcaccggcggtgagcttggccggggcacccggagctaccgcggcgacggcccttacagtggccacagacctccgccgtcccggcatggccactgcagctggtagccgcttcgataacggcgacgagtggactgccgccggggaagaagaccactgggaggaggtcgatgcagccttgatcgcggaggccatatgtctctagtacgggctcacgtactgtgcttcgatttcgatggatcggttggagctggtttatacggccgctacggtgtgggggagcaaagtcactgggggcctgtggcttcgctagctagcttcacgagcagctgtgtgcaactgctcagctcgaactctggaacgccggcagtaggatacacgtgcccacccggccggcctcgag

SEQ ID NO: 147 - protein, 75 aa, Zea mays
  unsure (1)..(75): unsure at all Xaa locations
ACLVXYILNXFFGGTSELLQVMLSNKHCSNFYCCLCCGYCSAXXXSGARHRLSFIDLLCKHNIARFYNSFRVSFR

SEQ ID NO: 148 - protein, 446 aa, Zea mays
  unsure (1)..(446): unsure at all Xaa locations
MCAICFIYILDYIYLNYTYIVFCAGLSGCVSQISCLFVALDSSVVRMAAPKPISRLISHVILDLDGTLLNTDSVVSKVVKPFILKNGKTWDSKKAHKLLVGKTPYEAAAVVLEDYGLPYSTEEFLSMITPMFSEQWCNLKPLPGANRLIKHLKTNGVPTALASNSPRCNIEAKIFFQQGWKEXSFSAIVGGDEVEKGKPSPNIFLEAAKRMNCAPSNCLVIEDSLPGVTGGKAAEMHVIAVPSIPKKTAEFSSADEVINSLLDVRPEKWGLPPFNDWIEGTLPIEPWFIGGPVIKGFGRGSKVLGIPTANLPAENFSDVVSEHTSGVYFGWAGLSTRGIYKMVMSIGWNPYFDNTEKTVEPWLLHDFGEDFYGEEVRLAIVGYIRPEANFPSLESLIERIHEDGRVAEKALDLPMYAKYKDSPYLRNPSKHGSSTTGGTQSEMDSK

SEQ ID NO: 149 - protein, 59 aa, Zea mays
RPGKRALRQKASGATCVQKLDGSRDFAIHPRYRILLRSSSMREPKYPVPKVESLIVSNR

SEQ ID NO: 150 - protein, 112 aa, Zea mays
MFKGWAFHYCFFFRDCMQYKAYVVVPISSLEQHLGTVNLSFLMLIGYCYMIGRMLLCVRERSSDAHNHSSLQRQFSSGHGQKVDDTGSGTGTRVSHFLPTSRRIVQFSNSKV

SEQ ID NO: 151 - protein, 395 aa, Zea mays
MEVAMVVSARASLLILVLSLCSPYKFIQSPMDLGPLNLLPTTSTAAASSDFGRILFRAPAAVLRPQSPRDISMLLSFLSGSPSLSRVTVAARGAGHSIHGQAQAPDGIVVETRSLPGEMEFHHVRGGGEGRASYADVGGGVLWIELLERSLKLGLAPRSWTDYLYLTVGGTLSNAGISGQTFKHGPQISNVLQLEVVTGLGQFGIITRARILLQEAPEKVTWVRAFYDDLGAFTRDQELLVSIPDSVDYVEGFMVLNERSLHSSSIAFPASVDFSPDFGTRSSPRIYYCVEFAVHHHHGYQKQSQAAVEAISRRMSHMASQLYSVEVSYLDFLNRVRMEEVSLRSAGMWEEVHHPWLNMFVPKPGVAGFRDLLMDNVSPDSFQGLILIYPLLRDK

SEQ ID NO: 152 - protein, 117 aa, Zea mays
  unsure (1)..(117): unsure at all Xaa locations
PKLRAVLHAILFYLVVAMDLSKXVLQVIDKKRQXFLWGNCLVSCEKVQFPIQFGELGIHNLETFGWSLRIRWLWARKIDEEHVWAGLPVQGPYIAQTLLVLLYKPQLVMKLSHWLFG

SEQ ID NO: 153 - protein, 210 aa, Zea mays
SIPFLALQSCFFHPGNSHTSSKPAEQISHRWQFHLSLDEDGTDNSSLFKEKLTHALRYFKESTDQHLLVQVWAPVKNGDRYVLTTSGQPFVLDHQSIGLLQYRAVSMTYMFSVDAENVGDLGLPGRVYKQKVPEWTPNVQYYSSGEYQRLNHAISYNVHGTVALPVFDPSAHSCIAVVELIMTSKKINYACEVDKVCKALEVRPSFSLSL

SEQ ID NO: 154 - protein, 212 aa, Zea mays
  unsure (1)..(212): unsure at all Xaa locations
PSVHNLFQKLGSFMELAFGGRYVILLMAIFXIYCGLIYNEFFSVPFHIFGKSAYECRDKSCSDAHTFGLIKVREPYPFGVDPSWRGSRSELPFLNSLKMKMSILMGVAQMNLGIVLSYFDARYHGNALDIRYQFIPQMIFLNSLFGYLALLILIKWCTGSQADLYHVMIYMFLDPAGDLGENQLFWGQKELQILLLLLALIAVPMLFPKPFI

SEQ ID NO: 155 - protein, 117 aa, Zea mays
  unsure (1)..(117): unsure at all Xaa locations
MIPNDVHNVLIPKHTCMPWSDSQTYLLCCNEPAETFVRADGAFIPFAHDFDISTVTTXXRGVGDIGDVKVIDLQSPLNSLIGRQVCKIGRSSGHTTGTVVAYALEYNDEKGISFFTD

SEQ ID NO: 156 - protein, 290 aa, Zea mays
MAPKAPANNGAVVVAGGHHGGSTDVGGVAGGATTTTVPTYVTANGNGKQHGTRKQRRRPAAAVVSPMDKYWTPVDDKEAAEAVEDGGEDGRRPLQFRTYKVKGILLHPYRLLTLLRLIAIILFFIWRIRHPHADGMWLWWISIVGDFWFGVTWLLNQVAKLNPTKRVPDLSLLRQQFDLPDGNSNLPRLDVFINTVDPINEPMIYTMNSILSILAVDYPIDRTATYLSDDGGSIIHYEGLLETANFATLWVPFCRKHSIEPRAPESYFAVKSRPYTGNVPDEFADDHRRM

SEQ ID NO: 157 - protein, 107 aa, Zea mays
MIHFPMPRHMQTVLTFMPYTVVFRHYVLYLFQAISRRATLYKMIRDYDQAANDVRKLISLLEKKVNVSGVSPKAFNKHNDLKQAHVRLSSIEDEAKNDTPLNLYLIL

SEQ ID NO: 158 - protein, 261 aa, Zea mays
MSGWRVEISGGFAFIYMEDERDAEDAISRLDGIDFGRKGRRIKVEWTKEDRTADRRGNSRRSPTNAKPTKTLFVINFDPINTRIRDLERHFDKYGRVANVRIKKNFAFIQFEAQEDATRALEGANGSHFMDRVISVEYALRDDDEKGERATNGYSPDRRGRERSPGARRSPSPYGRGRERGSPDYGRGKERGSPDYGRGGRSPDGRGGRPAGGGGGGRGDHARGGGRRRSPDYYDRERREASPGYDRPPSCSPGTGRDARD

SEQ ID NO: 159 - protein, 485 aa, Zea mays
  unsure (1)..(485): unsure at all Xaa locations
MPGSQNGGPRPRPVKVETIHDLARAGDLAGVQRKLLENPSLLNDKNPVMCQTPLHVAAGYNNTEIVKFLLNQQGTETVDLEAKNMYGETPLHMAVKNSSCGSTNLLLEHGAHIEAKANNGMTPLHLAVWHAIQAGDFSTVSVLLSYNPDCFVKDDEGKMPLNHIPGGAGSEKLLKLLTHHMEEQRKRKALMSCLEGKAMSEFEEAMSQIVGLQELKMQLRRWARGMFFDEKRRAMGLGIAKREXPHMAFLGNPGTGKTMVARILGKLLHMVGILPTDKVTEVQRTDLVGEFVGHTGPKTRRKIHDAEGGILFVDEAYRLIPMQKSDDKDYGLEALEEIMSVMDSGKIVVVFAGYCEPMKRVIASNDGFCRRVTKFFYFDDFSTTELAEILHMKMKSPSDCSLLYGFKLHPSCSIEAIGELIAREITEEQRKQMNGGLVDTLLINARENLDSRLDFNCNDADTMITITLEDLEAGLRQISRQRHLQ

SEQ ID NO: 160 - protein, 283 aa, Zea mays
IFKFKVIIVLNMQVENQEGVANFDDILANSDAFMVARGDLGMEIPIEKIFFAQKVMIFKCNIQGKPVVTATQMLESMIKSPRPTRAEATDVANAVLDGTDCVMLSGETAAGAYPELAVQTMAKICLQAESCVDHAAIFKSIMASAPIPMSPLESLASSAVRTANSARAALILVLTRGGTTARLVAKYRPSMPILSVVVPELKTDSFDWACSDEGPARHSLIVRGVIPMLSAATAKAFDNEATDEAIGFAIENAKTMGLCNTGQSVVALHRIGISSVIKLLTVK

SEQ ID NO: 161 - protein, 722 aa, Zea mays
MQYQHAGSRSRMPPFARGGGAYSRGRKQFYPPSPLPSAALSLPLQNKYEVLMEAGRLAAEYLLAKGVLPPGSLQQRSGTVVPGGWGQLPPPPPLSVTWEDQAYHGAINGRRQVDDECGIRNASSRRNRGGDYSSSNSSNYNRRGKRKFGADNRYSDWAKDSGRNRRYSDIRSYDDDGDNGAPGFKRERRSSGGIDEVGSRVSGVAGEGPSSKVEAMGESELEDTGSKASSNSNVQQKADASQEAEDENEANKMQENSVVSNSDVVEQALNGEDNSNNDSSDGVQELETKHLPVSSGEKVSDGRPEDSGVLNGKVEDGSTSHEKAEDDTTSEEVSIMENNLPNDVGNLLNYCNFARVPTRPRSVLANRNVEPAKKEIDVSELVIPVTPEEMSQMAMDREANTNFITNVEENSKDELVGQDQECAEESNICNQVAESMAFHEKETQGETEEMEEQKNIPRHYEVEDNNETNELSPTFASCQNNFSLQVEKGIQIYNLDTPPQDEVLIDPPDKGKTVDSELSPNIKAEDAVTIEEEKLGQSSSFKIRDLNLVGSPEVADMRGDPRLGQSFTAGCSVDLQDNQQIDLGTALGNNPNNTDTCTPFLLGNKAVQVIDIEDDSPIEAGACDTSKSKGEMVYSSMEGSMNPPANNDALHGIPDGYSLAISDYLGADMSCYQSIQTELQGGMNLNGSEGITVMDDSIYSSLGDIGFMEVWDQQPQDYEKFF

SEQ ID NO: 162 - protein, 112 aa, Zea mays
FTLDLEMGTGLARPAQATGPLHLLQAKEAAPYGPHVRRSAIMQVLTGINTTQNTKGWHQEACNAMQCQTTSRNPQRQNPPPITSKPSPTHRLFLVGLLSRARSLCPHRPAQA

SEQ ID NO: 163 - protein, 92 aa, Zea mays
EFIYKISTSMGKSLGNTCPWFEDYNRCFVFKGKEGTQKNKILFGTSAWCLPFYFNNSLFIKFRPFWGHQNSATPLHPLRNLFSTLHGGRYFD

SEQ ID NO: 164 - protein, 200 aa, Zea mays
MVIPKVPSGVSGTALAASLLRDGWSLAKIYEKYQEATDAFLHERRGRRHAEAVLERVLHEIEEKADLILDERAEHERMVEAYAMMDQKLQQALLEHDNFENNVRNLKSELKRRERDHSVAQKEIDDLQKQVAVLLKECQDIQLRCGSSLPNVGYVASSSSLVNVLSNVEHDIKDNMSFKDINGLVQQNVQLRNQIHMLSV

SEQ ID NO: 165 - protein, 95 aa, Zea mays
IILFVNLKRCRRLAAAVAVCFPLPRSTKTSAFLSYMLFFLPKPSHFSSRLPLPLTPNYPLLSTYPVHTFLPCAGPWSFLVVYRGKWEIDDEIADQ

SEQ ID NO: 166 - protein, 110 aa, Zea mays
RPSGLVGYSGPLVSKRQTQIPAATARVSPTASRTPSPLPPPPATLTRSYSIPSNSQRIPIVTADRLLEARNSRDGSDIYSPPLTPLSLTDLSQQQGTKTTAGGTRMKGAL

SEQ ID NO: 167 - protein, 249 aa, Zea mays
  unsure (1)..(249): unsure at all Xaa locations
MADQQQPQQQPQEMDVDRTGGLELPPGFRFHPSDFEIVSHYLKNKVHDRDYSCIAIADADLNKTEPWDLPSMHASDLARCGLTXHGACFDRMHAAEVAKMGEKEWYFFYQKDRKYPTGLRANRATEAGYWKATGKDKEVYDPLAAEGLLLVGMKKTLVFYKGRAPRGDKTNWVMHEYRLEGSGRLPASPASASGSATNIAAAMMKASASACKVRGTSNIYQSSSATMMHASTYYFLCLLARPRSRLNYK

SEQ ID NO: 168 - protein, 318 aa, Zea mays
MAVVSHASSLRFQYIDRRHNFTAKQASTSSSSSPSSAHGSRDRRPSFALVRRDAVTGSTYPSRRHAVLDLVARDNARAEYLASRLSPAAYQPTGFSGSESKVVSGLDEGSGEYFVRVGIGSPPTEQYLVVDSGSDVIWVQCKPCLECYAQADPLFDPATSATFSAVPCGSAVCRTLRTSGCGDSGGCDYEVSYGDGSYTKGALALETLTLGGTAVEGVAIGCGHRNRGLFVGAAGLLGLGWGPMSLVGQLGGAAGGAFSYCLASRGVVGDAGSLVLGRSEAVPEGAVWVPLVRNPQAPSFYYVGLSGIGVGDERLPLQ

SEQ ID NO: 169 - protein, 207 aa, Zea mays
VENDDLIAYGLIPEFIGRLPITVGLTNLSEEQLVQVVLMEPKNAIGKQYKKLFKMNDVKLHFTDNALRMIAKKALAKEAGARGLRSIMEGILTEAMFEIPDGRHGKEKVIAVLVDEESVGPLHSRGCRAKIFRDDGALELYVYQNNIKLPGLDTEQPQTQTHFPALPSSRIIGNKALDLPDKFLVFHRCMNGLHGYYARSTILHNKI

SEQ ID NO: 170 - protein, 621 aa, Zea mays
MAYGDRVTTFEDSEKESEYGYVRKVSGPVVVADGMGGAAMYELVRVGHDNLIGEIIRLEGDSATIQVYEETAGLMVNDPVLRTRKPLSVELGPGILGNIFDGIQRPLKTIAIKSGDVYIPRGVSVPALDKDVLWEFQPTKLGVGDVITGGDLYATVFENTLMQHHVALPPGSMGKISYIAPAGQYNLQDTVLELEFQGIKKKFTMLQTWPVRSPRPVASKLAADTPLLTGQRVLDALFPSVLGGTCAIPGAFGCGKTVISQALSKYSNSEAVVYVGCGERGNEMAEVLMDFPQLTMTLPDGREESVMKRTTLVANTSNMPVAAREASIYTGITIAEYFRDMGYNVSMMADSTSRWAEALREISGRLAEMPADSGYPAYLAARLASFYERAGKVKCLGSPDRNGSVTIVGAVSPPGGDFSDPVTSATLSIVQVFWGLDKKLAQRKHFPSVNWLISYSKYSKALESFYEKFDPDFIDIRTKAREVLQREDDLNEIVQLVGKDALAESDKITLETAKLLREDYLAQNAFTPYDKFCPFYKSVWMMRNIIHFNTLANQAVERAAGTDGHKITYSVIKHRLGDLFYRLVSQKFEDPAEGEEALVGKFKKLYDDLTTGFRNLEDEAR

SEQ ID NO: 171 - protein, 149 aa, Zea mays
  unsure (1)..(149): unsure at all Xaa locations
MQSNLFKWSSRTIVGDSIHTMGLRELKQMEGKLEKAINKIRARKNELLYAEVEYMQRRMDLQTDNMYLRSKIAENNNETGQPAMNMIGVPSTSEYDHMASFVDSRNFLQVNMQQQQPQHYSHXAATNDPPTRMMKLRIFGQQSMHASTQ

SEQ ID NO: 172 - protein, 290 aa, Zea mays
ATGAASAHTVAKPARRCVPAECCLVSPLHLVSCRPYQICSVFFFQVSARLSDMVGVTNHTEDGFSWALLKIQKDEAVSSQDIAAVLECNVKLAVALGVLNECFNPAKDRRTKIDMLHQAVYSLGSEFKRVSYEGFYTMVLDKDGETIAAALLRIHGTKVAEMPFAATLPAYRKQGMMRRLVNAVEQVLASVQVDKLVIPAIAALVDTWTRSFSFRPLLDPESREEIRRRSLVVIAGTTLLHKPVAAARPPSPHRHAEAAAPKNAGLPWWWKYTQQAPPLTDDERAFLDTA

SEQ ID NO: 173 - protein, 52 aa, Zea mays
KTCRLASVGQIRHPLLLAQKAESSPANFDQRTKLGSLPISNFRHSLTANLQQ

SEQ ID NO: 174 - protein, 136 aa, Zea mays
LREVHASIHTCNSLFFSSDSTDRSYKIMRSNGTADAMKLARNHFDKIKVLNFCSACSTKICYFLLVELRAAGWKCNSPHLYVADRASNSVVLRLPASLSLRWNSFSFELYLISLFCNLRAIYEQRKKSYGLNCRCK

SEQ ID NO: 175 - protein, 527 aa, Zea mays
  unsure (1)..(527): unsure at all Xaa locations
MLPSFVSPTASAAASVTPPPRPIPGSYGPPVLGPLRDRLDYFWFQSQDEFFRKRAAAHRSTVFRTNIPPTFPFFVGVDPRVVAIVDAAAFTALFDPDLVDKRDILIGPYNPGXGFTGGTRVGVYLDTXEEEHARVKTFAMDLLHRSARTWSADFRASVGAMLDAVDAEFGKDDGSDKKPSASYLVPLQQCIFRFLCKAFVGADPSADWLVDNFGFTILDIWLALQILPTQKIGLVQPLEELLIHSFPLPSFLIWPGYYVLYRFIEKHGAEAVAYAEAQHGIGKKDAINNMLFVLGFNAFGGFSVFLPFLVAKVGGAPALRERLRDEVRRAMVGKGKDGEFGFATVREGMPLVRSTVYEMLRMQPPVPLQFGRARRDFVLRSHGGAAYQVSAGEVLCGYQPXLAMRDPEVFERPEEFVPERFLGDDGARLLQHLFWSNGPETAQPGPGNKQCAAKEVVVDTACMLLAELFRRYDDFEVEGTSFTKLVKRQASPSVAQAAAARRSAAVSALYRIHRWRATSPAPAPAKQ

SEQ ID NO: 176 - protein, 110 aa, Zea mays
LDVLFEMQEFRRNHTKVSYKSVFLYIKTIEKGGKSWALTVCWFRFVAPHLPRRDQCVCDCQPQVLRLKRASYCLLGSCKSASRCLFLSRGSRPDTHHVSRTTARNLEYST

SEQ ID NO: 177 - protein, 271 aa, Zea mays
MESSWLLLLSCLPAVWVLSASPSSAPGRSPGCATRCGEIDVPYPFGLDPQCAIHAGFWLNCTTVDGATKLLDKNSEVTKISVEDGKAWFKNFISRQCYNQSSGDMFENNAWVDYTGEPYVLSAEDNKIIVLGCNSMAYMQSDSYIIGCMSTCDDPLKNGSCSGTAGCCQAELPPGVQFYQGFFNSLHNTTKIWKQTPCNYITVMESAAFSFSSTYLNSTVLYDSDDGRTPVVMEWGITRQTCEEAKANKTAYACVSNHSDCVYSDAAGYRC

SEQ ID NO: 178 - protein, 101 aa, Zea mays
FRDDINPDSFVFQIFALHITGTVDAVLSKEHRREICRHIYNHQNEDGGWGFNIIDESAMFSTCLNYTSLRLLGEVQQEENDGLAKGREWILSHGTATAVTQ

SEQ ID NO: 179 - protein, 72 aa, Zea mays
FACSCLTCLSLSCKSLLALLLLDELFIWLASSASAALANIIKAHIYFSVYSCHHTDVWCVLLATLQTTQLLS

SEQ ID NO: 180 - protein, 438 aa, Zea mays
  unsure (1)..(438): unsure at all Xaa locations
MRGRGSSGARMSXGXAAEAAXGAVGCGYDLTGXLRLGRAKPGGRLVDLDGAGKWAGTSPSPRELAFPGGAAVAGVPAGVVAGKGERARFRSDVLPFAQMAEEVNRSLSLPASKIPSGAFNAMFDYRGCWHRDAAATRSLXFDARLVELYSVEAVRASLALRDHVRRDLPPVWDPAALAEFIDKYGTHVIVGVKMGGKDVVCVKQLKGSSLTQSDVQARLKELADDRFSEDSTASSNSSTAGGGRLSQGLNVGPGSAAWQSFRSPVVSHKDSQDMVCIHVRRGGVDSGQGHGKWLSTITGFPDVISMSFVPITSLLTGVRGSGFLNHAVNLYLRYKPPIEELQQFLEFQVPRLWAPEFGQLPLSLQRRKNILPSLQFTLMGPKLHVNTAKVDSCLRPVTGIRLFLEGKKSDQLGVHLQHLSATPSAITVLKRGRVLGGR

SEQ ID NO: 181 - protein, 410 aa, Zea mays
LLSFGVFYQENCDALVTVVRFLSLVRNFHQERKISYTLVLCIYLLLLSSRTGAYIGVNIGTAMSSVPAPTQITTLLRSQNIRHVRLYDADPAMLAALSNTGIRVIVSVPNEQLLAIGNSNATAANWVARNVAAHFPAVNITAIAVGSEVLSAQPSAAPLLMPAMRYLQNALVAAALDRYIKVSTPHSSSIILDSFPPSQAFFNRSLDGVLVPMLRFLQSTGSPLMLNVYPYYDYMRSNGVIPLDYALFRPLPPNKEAVDANTLLHYTNVFDAVVDAAYFAMAYLNVTNVPVMVTETGWPHKGDSSSEPDATSDNADTYNSNLIRHVMNSTGTPKHPGVAVPTYVYELYDEDTRPGSTSEKYWGLFDMNGVPAYTLHLTGSGVLLANDTTNQTYCVAREGADPKMLQACKL

SEQ ID NO: 182 - protein, 289 aa, Zea mays
  unsure (1)..(289): unsure at all Xaa locations
MHYISVHGLVSLITCRKLVIKIRDKCVRYGVQIAVKRLKAMTAKAEMEFAIEVEILGRVRHKNLLSLRGFYAGGDERLIVYDYMPNHSLLTHLHTQRGAPSSQQHQPLDWARRVAIAIGAAEGLAXVIMHARAHTPTPCKCNQRLSLRIRVFVHFSYLHHEANPHIIHRDIKASNVLLDAEFVPKVADFGFAKLIPDGVSHLTTRVKGTLGYLAPEYAMWGKVSESCDVYSFGVLLLELVSARRPLEKLPGGVKREIVQWAAPLVDRRKWERLADPRLAGRFDLLQACK

SEQ ID NO: 183 - protein, 155 aa, Zea mays
HVVVFFSPISRCVCMMMTSGSLAGVWLAGCGTANGCRAGSEPPDPFVYRCCYAHCSALFSTRRHEACRGATRAKGKLISRRGKIALPGAPPPTGDGAGREDGRELLLLPVAGWHGRRDAITWSCTHHVRSRAVDLTCNTMLGLRCGVVQLSLGDR

SEQ ID NO: 184 - protein, 122 aa, Zea mays
PSFLKVIRLSAATQDVPRSVICNVHGVNPKFIEIGKLKHQQLCQREQAFFKGAYYIGKMVWSKGYTELLQLLHKHQMELSGLKMELYGSGEDADEVKASAERLSLDIRVYPGRDHGDSIFHE

SEQ ID NO: 185 - protein, 241 aa, Zea mays
TFWTICPACGMRYQYYLSILKKALRCQNCLKPFIAHDLKDQAIPSGANQRSAGVWKNAGTPQNSAGPQSNVTGQKGWSATSGVHVNTGSHHANVNTKRKADGNAGGLKNKMKSAQSTRKPSKASSSAGLKRGRRAAFESSESSISETSSDSEEEILKHGPSENRAGPGQQTRRSSRQKQEVKYNEDSDDDNYDAEDGNTVEDDFFGSPALKRLRKGGLFHGDHSTKTAKLNEDTTGHNGVS

SEQ ID NO: 186 - protein, 105 aa, Zea mays
ANMDDRLDDVLHPKESATDTNVTGLERPFKKKKLKINVNRPSGTRVKYDDEGNAIPPLASVAEEVSLEPVVHKDKISQRYAEMLREMQKHDKEDKLEHKKTLREK

SEQ ID NO: 187 - protein, 175 aa, Zea mays
QIALNLSSNHFTGPLPRELGRLDKLVVLDLSRNEISGQIPGDMRGMLSLIEVNLSNNRLAGAIPVFGPFQKSAASSFSGNAELCGDPLTVDCGSSIYGSSYGTETDHRGISYRVALAVVGSCVLIFSLVSLLVALFMWRERQEKEEEEAKKKAAEVAVAAAAPQVVASAVFVESL

SEQ ID NO: 188 - protein, 109 aa, Zea mays
PVHLYVGNKQKRMKAQKRARDIHTDEHTAQLTCMIVSHRAILMGLIEPQKHDISSGLQKPKQVYSLNYVKCTPQRKQNEGKCKMNRMRFTISLSHFNLCDYPNPLKTVH

SEQ ID NO: 189 - protein, 167 aa, Zea mays
CRAELQNSNVNNLTPLLSNERFHRCLIACSADLVLATHKTVIMMFPAVLESTGLTAFDLSKIIENFVRHEETLPRELKRHLNSLEEQLLESMAWEKGSSLYNSLIVARPSVASEINRLGLLAEPMPSLDDLVSRQNVRIEGLPATPSKKRAAGPGNLLLSFSVMFHI

SEQ ID NO: 190 - protein, 152 aa, Zea mays
PLLRACSVSPLAWFMSNQETSFVTIGQRVLANPLRVRFHYGHPDVFDRLFHVTRGGVSKASKIINLSEDIFAGFNSTLREGNVTHHEYMQVGKGRDVGLNQISLFEAKIANGNGEQTLSRDIYRLGHRFDFFRMLSCYYTTIGFYFSTMVFF

SEQ ID NO: 191 - protein, 39 aa, Zea mays
MVNRSDGEMVFVDDKQLKAKEPLVLIDYYEQHLRYNPTS

SEQ ID NO: 192 - protein, 317 aa, Zea mays
  unsure (1)..(317): unsure at all Xaa locations
MTNSDNTICAACGASAAYWASANIXLFLCLNPXELHRSIGPDISNVLACNFGDSSXRDIHSMLEGAGNLXANSIYEAFLPKDHPKPKPDSTMEYRTKFIRAKYETQDFLKPSLRISSRSSFKSTTSVKSVDSNFSSTSRKVISSIYLTLTNXYRKIQENFVGDLNITLVKGTNLAVRDMLTSDPYVVLTLGGQKAQSTVKKSDLNPVWNEVLKISVPRNYGPLKLEIYDHDIFSADDIMGEAEIDLQPMITAAMAFGDTSRLGDMQIGRWFMTKDNALMKDSTVNVVAGKVKQEVHLKLQNVESGEMELELEWVPIL

SEQ ID NO: 193 - protein, 96 aa, Zea mays
NYRSIGGTLQRAWSNVTVAPNYVPTSASLSSPLTMSLAGVNRKLELWLKTPESKGFILSRTKIKYMRCDSGTTRHEERDVSWVLWCPRRIFSVLMN

SEQ ID NO: 194 - protein, 425 aa, Zea mays
MDASAATPAPGPSFSGAESSAAAAQPPAEAPQLRVHGAGSGSGVARACRHHAYSRKQKSLGLLCSNFVALYDREDVEVIGLDDAAKRLGVERRRIYDIVNVLESVGILVRRAKNRYTWLGFGGVPAALKELKERALRKMSGSPVLLSMEDSSTANLSDDEDDEKLGDADEDAESEKLSQPVDNTSDKPDAPSCRLRSDHRKEKSLGLLTQNFVKLFLNMEVGTISLDEAARLLLGEGHADSNMRTKVRRLYDIANVLSSLNLIEKTQQADTRKPAFRWLGQAKRKQDNNVMVSVPPSMKAMPNKRAFGTDLTNIDNKRGKLDSAAENKVKLMQGAGNIVKTFERQLVQGKRSDFVYGPFHPAGAKKHETDDQTVKQQERKNIQDWENLAVSFRPQYQNQALNDLFGHYVEAWKSWYVDLTQETAS

SEQ ID NO: 195 - protein, 158 aa, Zea mays
  unsure (1)..(158): unsure at all Xaa locations
TVRARVPRHGPXASSPGKRQQQPQPASLRRSGGQRRPTTLSASSRGPVVPRAVATSADRASPDVSTSCLLYLSPLGHHQLMFSHCLAICLLHFHVFPLLLSQLIGKFTLDSNSELQVRPLDTRFIHPSATIFISITLLVHCVGTGRSEPSAAGFGVRD

SEQ ID NO: 196 - protein, 209 aa, Zea mays
MGALPRGLLAGICAVLLAAVVALAHGAEQETASMVVGLAKCADCTRKNMKADAAFNGLQVAVKCKNADGVFETKALGEVDKSGSFSVPLPADLLREDGELKQDCFAQLHSAANKPCPGQEPSWIVRPTTDNDDDDKMKNTFVAVAGKVHYPSKECASAFLFYHLFKKHLLHKKPMVIIPHIHKKPMVPMYRHSPVPEYKPPHPTPTPIY

SEQ ID NO: 197 - protein, 167 aa, Zea mays
RNLYPHHENVYLMKINHTFPCQEKCNCASECFSESHWQDYFCLFQTQRVDASSQGHWILSSFSLMLAGYHDQPLHCFSFDVIDLFQQFLLKKCESLETKQQKGISKLQQHLGGAPLSDDSTSFLFSFSLEKFLLEGACRFFEGFDIPVSQRLTPSFCTHTCAFVKAE

SEQ ID NO: 198 - protein, 124 aa, Zea mays
SGLSPHHCQQCPAEAMVGSYKKPCEQHQPVFQPKSSTADGRTSAFINTATHKLCFPKYDGSKDPLSWLHRYEQFFRVALDAPLSQRRCPVLGTFCNLADIRFRLPTRSNLLGELCHLRLQGLLN

SEQ ID NO: 199 - protein, 106 aa, Zea mays
LTGFTWPPMGRWWSYWSPARFLKSSGRCPRRRSKTSCGTSTISTTSTRTTTTTSPIPPRSPRRHAASTPMISPKILARVSRLLSLLLFNLLIRSLIVSVCTYTIHP

SEQ ID NO: 200 - protein, 433 aa, Zea mays
GGILAVSVFTNLYRSQRFKEAMKDVMTQCCSPDEVIFGPDFHQSLYCHLLCGLIYSDEIQFVFSPFAHSLVHAFHSLEEVWEDLCADIRDGVLSKRVTAPSIRQAVSKILRPNPELASSIYIKCQSLSNWYGVIPTLWPNVKYIYGIMTGSMEPYLKKLRHYAGHLPLLSADYGASEGWVGSNINPTLPPEEVTYAVLPNIAYFEFIPLEKPKWEETEICSSVHYIESEPVGLTEVEVGKIYEVVITNFAGLYRYRLGDIVKIAGFHNATPELQFICRRSLVLSVNIDKNTEKDLQLAVEAAEKLLAAEKLEVVDFTSLVDRSSEPGHYVVFWELSSDDGASEDVLSGCASCMDLAFADAGYVGSRKTQTIGALELRVLRKGAFAQVMNHYLSLGGAVSQFKTPRFVGQSNSKVLQILSRNVTRSYFSTAYGL

SEQ ID NO: 201 - protein, 78 aa, Zea mays
QTVIRNLQSSENHKAPPSACLSTSTNLTVFPSSEEQSLSDPAFWKSAEENTDNGGNPRLLSDSSFHRGIPLESTAGSS

SEQ ID NO: 202 - protein, 87 aa, Zea mays
IEPGVSQCDSVFLLNYFSFKKDRPCTMVRTLTESHQVMGLQPPLRILMGKACLGLSLFPDPTSVGASSTVSIIFIFIFKQIVHMCNS

SEQ ID NO: 203 - protein, 120 aa, Zea mays
  unsure (1)..(120): unsure at all Xaa locations
YSFIVILLKSLRRMNHPNIVKLKEVIRENDILYFIMEYMVNMLCIANILLHHYCVLESEPLFLXECNLYQLMKERVKPFSESEVRNWCFQIFQALAYMHQRGYFHRDLKPGRISVFSTIS

SEQ ID NO: 204 - protein, 346 aa, Zea mays
FVSVCIAEHVFFYQDLTLLLCTSGRDPGIIPRNTHPPEPESIDGINDTGVQTPQQFRLPRTKEVVVNGISVRVKYCDTCMLYRPPRCSHCSICNNCVERFDHHCPWVGQCIGLRNYRFFYMFVSSTTLLCLYVFAFCWVYVIKIRAAEHLSIWKALLKTPASIVLIIYCFLCVWFVGGLSVFHLYLMGTNQTTYENFRYRYDRRDNPYNRGTLNNFLEIFCTAIPPSKNNFRARVTVEQGLQQTRSQSRGFMSPSMGKPTIGELEMGRKPVVPWDEPRTAADIRDLEAGHASPDLSRDLPAEFVEGRTGMHSRQSSDLQQKLHKRKNSQRSFISIDPTFRLSTNLQ

SEQ ID NO: 205 - protein, 535 aa, Zea mays
MPPPLLEFAILATACRFSKPLTVLRRLGVLGPPTVRRNAAEAFVPSPFRQVVVQSGKLLGTPRFCHTTAGMSECLPDVYASQVLKVLKSTSADNTDLSGALHQFAVHMDEDIILMVLQKQRSNWQVALAFFNWAATLPGYAHGSRAYTEMLDILGRMKKVRHMRQLFDEIPEERRQVVVTNKMFAVLLNRYAGAHKVQEAIEVFYLRKDYGFELDLVGFQILLMSLCRYKHVEEAEALFREKKDEFPHVTKSWNIILNGWCVKGSLRDAQRIWNDIIASKVERDLFTFGTFINALAKNGRISAAVKLFKQMWEKGINPDVAICNCIIDQLCFKKKIPEALEIFGEMNDRLCQADVATYNTLIKYMCKIKRMEKVYELLDDMEAKGCPPNNRTYSYILKTTEKPKDVIALMQRMERTGCKLDSDIYNLILNLYIKWKYEKGMQQIWDEMERRGSGPDQRSFTIMVHGLHSQGKLDEALQYYTTMKSRGMIPEPRTKILVKAMHMKKDGAATEDDSASMAGKHLKLDHRSRLFNVHR

SEQ ID NO: 206 - protein, 163 aa, Zea mays
LIEVKHTRPIAITGRRERRTVCCVGLSCHRRLFLSSLATTAAFLACQASPIVVGAAPAEAASYAAKSLMPMPMPMPSCMPLAACKLQTLHANQFALLSGITQTGSVDEPPAAGCRRQDGSIRMNTTAATLLFPGKRIAAAVLLLWSFPVLIGWRHSFHTSMGC

SEQ ID NO: 207 - protein, 61 aa, Zea mays
DGYIYIYRLGTLTLIGQQPNSGASLTTYIGTHTHSNNSCVHGKQFHVFIRVQDASHSGSKS

SEQ ID NO: 208 - protein, 613 aa, Zea mays
  unsure (1)..(613): unsure at all Xaa locations
KVYALVWLLPEDEDAEKRAQARVRDDEDAERRDGEDGGAMRPLARTPHMFCKTLTASDTSTHGGFSVPRRAAEDCFPPLDYSQQRPSQELVAKDLHGTEWKFRHIYRGQPRRHLLTTGWSAFVNRKKLISGDAVLFLRGEDGVLRLGVRRAAQLKIVTPIPAPHNQCSSNSNLGNVAQAVATKTVFHIYYNPRLTQSEFIXPYWKFTRSFNQPISVGMRCRMRYESDDASERRCTGIIIGSREADPIWYGSKWKCLVVRWDDGIECRWPNRVSPWEIELTGSVSGSQMCAPSSKRLKPCLPQVNPEIVLPNGSVSSDFAGSARFHKVLQGQELLGFKTHDGPAISASQATEARNLQYSDERSNNNLGIPRLGVRSPTGIPGFPYHCSGFGESQRFQKVLQGQEVFHPFRGGCLADGHIRTAGMYQPDGRHVSGAAYKWSAPQGYDFPQPAKPFFLLQESSPSSVMMFPQTRSKITHLEYEYSRHEDGRLDRTVPTQDMGRSNQTLSLWPHLVSGEAIEECTGTVNMHSPVSGAEHESNNESTVENGCKIFGISLAEKIRSCDEADSCSAKCNSRLQPLKSQMPKSLGSCWATVHEQRPVVGRVVDVSATDMMI

SEQ ID NO: 209 - protein, 79 aa, Zea mays
TLTLYVNPVFLLSCRTALNEALTAEVQRLKLATAGLGDSCSSNSLAQQMQIQLSAHDQTFELHQQQAMPIAFYQGYRAR

SEQ ID NO: 210 - protein, 343 aa, Zea mays
  unsure (1)..(343): unsure at all Xaa locations
PFPVARHRSHGPHWGPLGRTXPKDETADNDDEMDMDETDYHPVAAAAAGPCEGRKEKKGMDFSRWREFVGDAPPKRRQGKPVQAKKQSDQRIDAGAVASKVGGVAAEGRGLEGGAMRLDSGNASEGPGPVLLVSDVVSKKPMSQVESRDELVNTSEARNLASQAESMDLDGRESSMEAEISAENMARLAGMSAGEIAEAQADIVNKLNPALLEMLRRRGREKSGGTKDVGKAKGLKTSGLQKNKRATPGDWLTAGEHTGHSWKVWSERVERIRSCRFTLDGDILGFQSSHEHQDGKKMPSESVAERDFLRTEGDPAAVGYTINEAVALTRSMLPQIIGSGDSN

SEQ ID NO: 211 - protein, 111 aa, Zea mays
LNFPSVFDFSQNRLFTPPLAGVLDPTLVPCGNQKSPSPWTLAHDVVRRACGSLGTSWMRAEFFVEASWLPLLTPHRGWGPRAMICWYVVPYQITMLLASYSTCRTRVCVLE

SEQ ID NO: 212 - protein, 255 aa, Zea mays
MDGDGGGAGALHHHTRSPEDVFRDFRARRAGIVKALTTDVEKFYQQCDPEKENLCLYGLPNETWEVTLPAEEVPPELPEPALGINFARDGMVEKDWLSLVAVHSDAWLLSVAFYFGARFGFDKDARRRLFTMINNLPTVYEVVTGVAKKQSKAPNGSSKSSKPNSKPSKLTNSNSKPAKPAHPKEEEDSGREDAEEDQAYLCGSCGESYANGEFWICCDVCEKWFHGKCVRITPAKAEHIKQYKCPSCSTKRSRE

SEQ ID NO: 213 - protein, 55 aa, Zea mays
GLTVTAHCMPDLCCFIYVPARVSNRFELKGRTSDLLMRLRCSTVFASGRPICRTN

SEQ ID NO: 214 - protein, 64 aa, Zea mays
FRCVRDNRGTTSPTSPFRFTRVGCIQSKDSERISDILGLWCLRKFGQGQLETAGQHEQCPQQCS

SEQ ID NO: 215 - protein, 161 aa, Zea mays
LTRRTCAACRAIQRANCFHVEGHGDPCNISSTPYMIIFGVVQIFFSQIPDFDQISWLSILAAVMSFTYSTIGLGLGIAQVVSNKGVQGSLTGISVGAVTPVDKMWRSLQAFGDIAFAYSYSLILIEIQDTIRAPPPSESKVMRRATVVSVAVTTFFYMLCG

SEQ ID NO: 216 - protein, 167 aa, Zea mays
RYRTIAHMLTRHRASMNFTCAEMRDSEQSSEAKSAPEELVQQVLSAGWREGLNLACENALNRYDATAYNTILRNARPQGINKNGPPEHKLHGFTYLRVSDELFQEQNYTTFKTFVRRMHANLDYNPNVDPVAPLERSKAEIPIEEILEVAQPKLEPFPFDKDTDLPV

SEQ ID NO: 217 - protein, 93 aa, Zea mays
HQEKVGEKWSTVAKLQEEWVENADRWVAGFLEKFEEGCHSMGTAIKERIQERLIKAQSSDFGSLLQYDSYDSDEAKENDEDEDEDELFEDVKE

SEQ ID NO: 218 - protein, 217 aa, Zea mays
  unsure (1)..(217): unsure at all Xaa locations
MAAKMFALFALLALXICATATSATHIPGHLSPLLMPLATMNPWMQYCMKQQGVANLLAWPTLMMQQLLASPLQPCQMPMMMPGMMPPMPMMPMPSMMSSMMVPTMMSPMTMASMMPPMMMPSMISPMMMPSMMSSMIMPSMMMPTMMSPMMMTSMIPPMMMPSMVSPMMMPNMMTVPQCYSDSISHIIQQQLPFMLSPTAMAIPPMFLQQPFVGAAL

SEQ ID NO: 219 - protein, 336 aa, Zea mays
  unsure (1)..(336): unsure at all Xaa locations
MASAIKAASTSSQWSSSPAAVHSSPLSKRLPAAVAMPGRRRSVATVRAVAAVAPGAPAKLTAGAGGRCLPVSQTMSRLRAQGKTAFIPYITAGDPDLATTAEALRLLDACGADVIELGVPFSDPYADGPVIQASAARALASGTTPDGVLAMLKGVTPELSCPVVLFSYFNPXVRWGLADFAAAVKEAGVHGLIVPDLPYGNSCALTLRTEAIKNSLELVLLTTPSTPADRMGEITRASRGFVYLATVNGVTGPRANVNTRVQSLIQEVKQVTDIPVAVGFGISKPEHVKQIAEWGADGVIIGSAMVRQLGEAASPKEGLKRLEKYARSMKNALPCQ

SEQ ID NO: 220 - protein, 268 aa, Vibrio vulnificus CMCP6
MDRYQATFERLAAQKQGAFVPFVTVCDPNPELSLKIMDTLVKAGADALELGIPFSDPLADGPTIQGANIRALDSGATPDICFDLIGQIRAKYPDLPIGLLMYANLVYSRGIENFYQRCAQAGIDSVLIADVPTNESAEFVAAAEKFGVHPIFIAPPTASDETLKQVSQLGGGYTYLLSRAGVTGAETKANMPVGDMLAKLEQFNAPPALLGFGISEPEQVKQAIDAGAAGAISGSAVVKIIESHLNEPDAMLTALANFVSNMKSATQK

SEQ ID NO: 221 - protein, 169 aa, Enterococcus faecium
MVHLMASKRCEESYGRKDDGFGTQNQKLSEDESVMQHIIPEDLLKFGLIPEFIGRLPVMAALEKLTTDDLVRILTEPKNALVKQYQKLLSLDNTELEFEPEALRAIAKKAIERNTGARGLRSIIEEIMMDVMFDIPSNENIEKVIITKEAAELSGEPTVIYKDSEKKAG

SEQ ID NO: 222 - protein, 489 aa, Pentaphragma ellipticum
GSGVSTLEKNNLGRIAQIIGPVLDVAFPPGKMPNIYNALVVKGRDTVGQPINVTCEVQQLLGNNRVRAVAMSATDGLMRGMEVIDTGAPLSVPVGGATLGRIFNVLGEPVDNLGPVDTRTTSPIHRSAPAFIQLDTKLSIFETGIKVVDLLAPYRRGGKIGLFGGAGVGKTVLIMELINNIAKAHGGVSVFGGVGERTREGNDLYMEMKESGVINEQNIAESKVALVYGQMNEPPGARMRVGLTALTMAEYFRDVNEQDVLLFIDNIFRFVQAGSEVSALLGRMPSAVGYQPTLSTEMGSLQERITSTKEGSITSIQAVYVPADDLTDPAPATTFAHLDATTVLSRGLAAKGIYPAVDPLDSTSTMLQPRIVGEEHYETAQKVKQTLQRYKELQDIIAILGLDELSEEDRLTVARARKIERFLSQPFFVAEVFTGSEGKYVGLAETIRGFQLILSGELDGLPEQAFYLVGNIDEATTKAMNLEMESNLK

SEQ ID NO: 223 - protein, 452 aa, Sulfolobus solfataricus
MRKTKIVATLGPSSEEKVKELAEYVDVFRINFAHGDETSHRKYFDLIRTYAPESSIIVDLPGPKLRLGELKEPIEVKKGDKIVFSQKDGIPVDDELFYSAVKENSDILIADGTIRVRVKSKAKDRVEGTVIEGGILLSRKGINIPNVNLKSGITDNDLKLLKRALDLGADYIGLSFVISENDVKKVKEFVGDEAWVIAKIEKSEALKNLTNIVNESDGIMVARGDLGVETGLENLPLIQRRIVRTSRVFGKPVILATQVLTSMINSPIPTRAEIIDISNSIMQGVDSIMLSDETAIGNYPVESVRTLHNIISNVEKSVKHRPIGPLNSESDAIALAAVNASKVSKADVIVVYSRSGNSILRVSRLRPERNIIGVSPDPRLAKKFKLCYGVIPISINKKMQSIDEIIDVSAKLMQEKIKDLKFKKIVIVGGDPKQEAGKTNFVIVKTLEQQKK

SEQ ID NO: 224 - protein, 421 aa, Oenococcus oeni MCW
MKNMDVESIQPTLACSFCGKRQDQVKKLIAGPGVYICDECVALAQHIIDQELEHEQQALVLDDLPTPIELVKHLNEYVIGQEEAKKTLAVAVYNHYKRVNESLQHKSDVELQKSNILLIGPTGSGKTYLAQSLAKMLDVPFAIADATTLTEAGYVGEDVENVVLKLLQAADFDVEKAQRGIIYIDEIDKIAKKSENVSITRDVSGEGVQQSLLKLLEGTISSVPPQGGRKHPQQEYIQVDTSNILFIVGGAFDGIEDVIRDRLGESMIGFGHEDQQEKQQFNKKNPLTQFTDQDVIKFGLIPEFLGRLPIISILNPLYEDDLVKILTKPKNALVKQYKALLALDGVQLDFDPKALKEMAKIAIDKKSGARGLRSIMESTMKETMYEIPSKPDVAKVLVTKAAVDGKAQPKIISTSKKALAS

SEQ ID NO: 225 - protein, 764 aa, Thermoplasma acidophilum
MGKIIRISGPVVVAEDVEDAKMYDVVKVGEMGLIGEIIKIEGNRSTIQVYEDTAGIRPDEKVENTRRPLSVELGPGILKSIYDGIQRPLDVIKITSGDFIARGLNPPALDRQKKWEFVPAVKKGETVFPGQILGTVQETSLITHRIMVPEGISGKVTMIADGEHRVEDVIATVSGNGKSYDIQMMTTWPVRKARRVQRKLPPEIPLVTGQRVIDALFPVAKGGTAAVPGPFGSGKCVSGDTPVLLDAGERRIGDLFMEAIQDQKNAVEIGQNEEIVRLHDPLRIYSMVGSEIVESVSHAIYHGKSNAIVTVRTENGREVRVTPVHKLFVKIGNSVIERPASEVNEGDEIACASVSENGDSQTVTTTLVLTFDRVVSKEMHSGVFDVYDLMVPDYGYNFIGGNGLIVLHNTVIQHQLAKWSDANIVVYIGCGERGNEMTEILTTFPELKDPNTGQPLMDRTVLIANTSNMPVAAREASIYTGITIAEYYRDMGYDVALMADSTSRWAEALREISGRLEEMPGEEGYPAYLGRRVSEFYERSGRARLVSPDERYGSITVIGAVSPPGGDISEPVSQNTLRVTRVFWALDAALANRRHFPSINWLNSYSLYTEDLRSWYDKNVSSEWSALRERAMEILQRESELQEVAQLVGYDAMPEKEKSILDVARIIREDFLQQSAFDEIDAYCSLKKQYLMLKAIMEIDTYQNKALDSGATMDNLASLAVREKLSRMKIVPEAQVESYYNDLVEEIHKEYGNFIGEKNAEASL

SEQ ID NO: 226 - protein, 425 aa, Agrobacterium tumefaciens str. C58 (Cereon)
MSKVSGSNGGDSKNTLYCSFCGKSQHEVRKLIAGPTVFICDECVELCMDIIREENKTSMVKSREGVPTPQDIIKILDEYVIGQKQAKKILSVAVHNHYKRLAHASKNGDVELAKSNIMLVGPTGCGKTYLAQTLARIIDVPFTMADATTLTEAGYVGEDVENIILKLLQAADYNVERAQRGIVYIDEVDKISRKSDNPSITRDVSGEGVQQALLKIMEGTVASVPPQGGRKHPQQEFLQVDTTNILFICGGAFAGLDKIISARGEKTSIGFGATVKAEDDRRVGEVLRELEPEDLVKFGLIPEFIGRLPVLATLEDLDEDALIQILSEPKNALVKQYQRLFEMEDVELTFHEDALREIARRAITRKTGARGLRSIMEKILLDTMFELPTLEGVREVVISNDVVSGVARPLYIYADRQEEKANVSA

SEQ ID NO: 227 - protein, 486 aa, Quiina pteridophylla
SGPGVSTLEKKNLGRIAQIIGPVLDVTFPPGKMPNIYNALVVKGRDTAGQQINVTCEVQQLLGNNRVRAVAMSATDGLMRGMEVIDTGAPLSVPVGGTTLGRIFNVLGEPVDDLGPVDTRTTSPIHRSAPAFIQLDTKLSIFETGIKVVDLLAPYRRGGKIGLFGGAGVGKTVLIMELINNIAKAHGGVSVFGGVGERTREGNDLYMEMKESGVINEENIAESKVALVYGQMNEPPGARMRVGLTALTMAEYFRDVNEQDVLLFIDNIFRFVQAGSEVSALLGRMPSAVGYQPTLSTEMGSLQERITSTKEGSITSIQAVYVPADDLTDPAPATTFAHLDATTVLSRGLAAKGIYPAVDPLDSTSTMLQPQIVGEEHYETAQRVKQTLQRYKELQDIIAILGLDELSEEDRLTVARARKIERFLSQPFFVAEVFTGSPGKYVSLTETIRGFKLILSGELDSLPEQAFYLVGNIDEATAKATNLEME

SEQ ID NO: 228 - protein, 290 aa, Oryza sativa
MRPVFCGNLDYDARQSEIERLFSKYGRVERVDMKSGFAFVYMEDERDADEAIHRLDRIEFGRKGRRLRVEWTKEDRSGGRRGNSKRSPNNTRPTKTLFVINFDPINTRTRDLERHFDQYGKISNVRIRRNFAFVQYELQEDATKALEGTNGSTLMDRVISVEYALRDDDEKRNGYSPERRGRDRSPDRRERSASPYGRGRERGSPDYGRGRERGSPDYGRGGDRGSPDYHRGASPQGGNKGDERGSPPNNYDRERREASPGYDRPRSRSPARYEKKKKKKKKKKKKKKKK

SEQ ID NO: 229 - protein, 456 aa, Ochroma pyramidale
IGPVLDVAFPPGKMPNIYNALVVKGRDTAGQQINVTCEVQQLLGNNRVRAVAMSATDGLMRGMEVIDTGAPLSVPVGGATLGRIFNVLGEPVDNLGPVDTRTTSPIHKPAPAFIQLDTKLSIFETGIKVVDLLAPYRRGGKIGLFGGAGVGKTVLIMELINNIAKAHGGVSVFGGVGERTREGNDLYMEMKESGVINEQNLAESKVALVYGQMNEPPGARMRVGLTALTMAEYFRDVNEQDVLLFIDNIFRFVQAGSEVSALLGRMPSAVGYQPTLSTEMGSLQERITSTKEGSITSIQAVYVPADDLTDPAPATTFAHLDATTVLSRGLAAKGIYPAVDPLDSTSTMLQPRIVGEEHYETAQRVKQTLQRYKELQDIIAILGLDELSEEDRLTVARARKIERFLSQPFFVAEVFTGFPGKYVGLAETIRGFKLILSGELDGLPEQAFYLVGNIDE

SEQ ID NO: 230 - protein, 293 aa, Pirellula sp.
MRPVPSAHPDADPPSMTPLQSLFESLRGQNRKALMPFLTTGDPNIDTTEAVIAAARQAGADLCEVGVPYSDPIADGPVIQASYQRALDAGFKLQHVWDLGQRLTENPKVKAMPRVTMVSYSIIYRIGMAKYVDQAMQAGYCGAIVPDLLVEEAEDLSKICREKGFDLIQLVTPTTTRDRQCRIAELSSGFLYYVSVTGITGERTALPTNLVDNVGWLREQTELPICIGFGISGPETAAQLAPVSDGLIVGSAIVRRVADAVEKAKSSGADPVKTAAEEAGDFCHSLRQAIDAA

SEQ ID NO: 231 - protein, 411 aa, Pasteurella multocida
MEKDTELHCSFCGKEQKHVSKLIAGTSGYICNECIELCHDMLLSDAVETPEVESTEQQKLPTPHEIRAHLDDYVIGQDYAKKVLSVAVYNHYKRLRSDKQITDVELGKSNILLIGPTGSGKTLLAETMARMLNVPFAMADATTLTEAGYVGEDVENVLQKLVQSCDYDVERAEQGIIYIDEIDKITRKSENPSITRDVSGEGVQQALLKLIEGTVASIPPQGGRKHPQQEMLRVDTSKILFICGGAFAGLDKVIEKRVHVGSGIGFSAEVKSKQDKATLSQLFEQVEPDDLMKFGLIPEFIGRLPVVAPLAELDEEALVKILTEPKNALIKQYQALFSLEDVALEFSPEALTAMAKKALARKTGARGLRSIVEAILLDTMYDLPSLQHLEKVIVEASTITDNQPPTLVYKA

SEQ ID NO: 232 - protein, 619 aa, Sorghum bicolor
MMRHSEIMKLLAFVLLMLGCQQSSLCLAVDSQVEALVEMKMQLVDNRGVLSDWKDNQMSPCYWEYVNCQDNKVSTITLSSSGLTGTLSPSIAKLTTLQQLKLDNNNITGGIPPEFGNLSSLTILNLGRNNLNGSIPDSLGQLSKLQILDLSHNHLSGNIPSSFSNPPSLNDINLAYNNISGEIPQHLLQAAHYNFTGNHLNCGQNLFPCEGGSTMTGGSKNSKLKVVIGSIAGAVTLCVTVALVLLWWQRMRYRPEIFIDVSGQNDHMLEFGQIKRFSWRELQIATNYFSEQNVLGKGGFGKVYKGVLPGPDSIKIAVKRLFNVERHEGELAFLREVELISIAVHKNILRLIGFCTTPTERLLVYPFMENLSVASRLRDIKLNEPVLDWSTRMRIALGAARGLEYLHEHCNPKIIHRDVKAANVLLDGNFEAVVGDFGLAKMMDIGRNTVTTGVRGTMGHIAPEYIKTGRPSVKTDIYGYGVMLLEIVTGERAIAFHPDRMEEAGEIMLIDQVKLWMEEGRLLDLVDRNLGGVYNLEELEKVTQIALLCTHMEPSQRPTMSEVVQMLEGEIVPAERWEEWQLAELQRRQQHEMRQQGKLFNFSEESLNIQEAIELSTGR

SEQ ID NO: 233 - protein, 496 aa, Pedicularis coronata
INPTTSGSGVSTLEKKNLGRIVQIIGPVLDVAFSPGKMPNIYNALVVKGRDTIGQPINVTCEVQQLLGNNRVRAVAMSATDGLMRGMEVIDTRAPLSVPVGGATLGRIFNVLGEPVDNLGPVDTRTTFPIHRSAPAFIQLDTKLSIFETGIKVVDLLAPYRRGGKIGLFGGAGVGKTVLIMELINNIAKAHGGVSVFGGVGERTREGNDLYMEMKESGVINEENIAESKVALVYGQMNEPPGARMRVGLTALTMAEYFRDVNEQDVLLFIDNIFRFVQAGSEVSALLGRMPSAVGYQPTLSTEMGTLQERITSTKEGSITSIQAVYVPADDLTDPAPATTFAHLDATTVLSRGLAAKGIYPAVDPLDSTSTMLQPRIVGEEHYEIAQRVKQTLQRYKELQDIIAILGLDELSEEDRLTVARARKIERFLSQPFFVAEVFTGSPGKYVGLAETIRGFQLILSGELDGLPEQAFYLVGNIDEAATKAMNLEMESNLKK

SEQ ID NO: 234 - protein, 400 aa, Geobacter metallireducens
MENGAISLRKGDPLDIVTDEVLGTPTLISTIYKALPHDVKPGSRILMDDGLIELKVHSVEGNLVRCTVVEGGTLKDLKGINLPGVHVSAPSLSEKDLRDLEFCLAEGVDYIALSFVRSAEDVEGLKRILFERGIHIPVVAKIEKPEALRNFKSILKAADGVMVARGDLGVEISAEKVPLFQKKIIRACNEAGKPVITATQMLESMISHPRPTRAETSDVANAILDGTDAVMLSGETASGQFPLEAVRTMAKVALDVERYAQMEDTLPQRRHNPSIAEAVAEAACRAAVTVDARAISVMTQSGSTAALISKFRPPLPIIAFTQSLETRRRLSLYWGVKPLPIGPMTGTDEQIAAVESTFLSAGYRKGDVIVITMGVPVEARGSTNLMKVHKLGTGKFFEIF

SEQ ID NO: 235 - protein, 268 aa, Magnetospirillum magnetotacticum
MSVGRFSKCAGGRSADNRHCPLLKLGRARYAAEPFNQIRAAALSTPPGMSLITDPMMNAPLKAFGPIKAVIFDMDGLLLDTEGIYTEVTSLIAERYGRTFDWSIKQNIIGRGAGDLARYVVEALDLPITAEEFLVIREPLMRERFPTAQAMPGAEELIRHLKAHNIPIAVGTSSSRQSFGQKTTLHRDWFALFDFIVTADDPEVGAAKPAPDIFLTAARRLGVAPEDCLVFEDSPFGVTAAKAAGMTAIAIPDAAMADEKYAHADGIL

SEQ ID NO: 236 - protein, 485 aa, Cola nitida
  unsure (1)..(485): unsure at all Xaa locations
SGXSTLEKEXLGRISQIIGPVLDVAFPPGKMPNIYNALVVKGRDTVGQQINVTCEVQQLLGNNRVRAVAMSATDGLMRGMEVIDTGAPLSVPVGGATLGRIFNVLGEPVDNLGPVDTRTTSPIHKPAPAFIQLDTKLSIFETGIKVVDLLAPYRRGGKIGLFGGAGVGKTVLIMELINNIAKAHGGVSVFGGVGERTREGNDLYMEMKESGVINEQNLAESKVALVYGQMNEPPGARMRVGLTALTMAEYFRDVNEQDVLLFIDNIFRFVQAGSEVSALLGRMPSAVGYQPTLSTEMGSLQERITFTKEGSITSIQAVYVPADDLTDPAPATTFAHLDATTVLSRGLAAKGIYPAVDPLDSTSTMLQPRIVGEEHYETAQRVKQTLQRYKELQDIIAILGLDELSEEDRLTVARARKIERFLSQPFFVAEVFTGSPGKYVGLAETIRGFKLILSGELDGLPEQAFYLVGNIDEATAKATNLEMES

SEQ ID NO: 237 - protein, 224 aa, Streptococcus pneumoniae
MPKTLTEKLNAIKAAGKGIFVPYIMAGDHEKGLDGLAETIHFLEDLGVSAIEVGIPFSDPVADGPVIEEAGLRSLAHGTSTQALVETLKTIETEIPLVIMTYFNPLFQYGVENFVKDLADTAVKGLIIPDLPHEHANFVEPFLANTDIALIPLVSLTTGIERQKELIAGAEGFVYAVAINGVTGKSGNYRADLDKHLAQLHQVADIPVLTGFGVSSQADLERFN

SEQ ID NO: 238 - protein, 298 aa, Thermoanaerobacter tengcongensis
MGIWPVFFEGYRIEKKAEKEISKELEQVDEKKLQEEALRELNSLIGLHKVKEIIYEIYAFSQLQMKRKKEGLATDPIVLHMIFKGNPGTGKTTVARILGKLLKGIGVLEKGHVVEVERADLVGEYIGHTAHRVRENVKKALGGILFVDEAYSLARGGEKDFGKEAIDTLVKEMEDNRNKFILILAGYKYEMEYFLNTNPGLRSRFPIQIDFPDYTIEELLQIAEVMVKNRQYKLTESAKRKLMKILIKNDASREMGNARMVRNIIEKAIRKQAVRVLNKVNITKEDLITIDSIDIRED

SEQ ID NO: 239 - protein, 221 aa, Ginkgo biloba
MGRGKIEIKRIENTTNRQVTFCKRRNGLLKKAYELSVLCDAEVALIVFSSRGRLYEFANNSVKRTIDRYKKTCADNSQGGAISECNSQYWQQEAGKLRQQIDILQNANRHLMGDALTSLSVKELKQLEIRLERGISRVRSKKNEMLLEEIEIMQRREHILLAENQFLRTKIAECESSQNANMLPGPEFDALPGFDSRHFLHASIMDAHHYAQQDQTALQLG

SEQ ID NO: 240 - protein, 490 aa, Carnarvonia araliifolia
DPGVSTLEEKNLGRIAQIIGPVLDVAFPPGKLPNIYNALVVKGRDTVGQQINVTCEVQQLLGNNRVRAVAMSATDGLMRGMEVIDTGAPLSVPVGGATLGRIFNVLGEPVDNLGPVDTRTTSPIHRSAPAFIQLDTKLSIFETGIKVVDLLAPYRRGGKIGLFGGAGVGKTVLIMELINNIAKAHGGVSVFGGVGERTREGNDLYMEMKESGVINEQNIAESKVALVYGQMNEPPGARMRVGLTALTMAEYFRDVNEQDVLLFIDNIFRFVQAGSEVSALLGRMPSAVGYQPTLSTEMGSLQERITSTKEGSITSIQAVYVPADDLTDPAPATTFAHLDATTVLSRGLAAKGIYPAVDPLDSTSTMLQPRIVGEEHYETAQRVKQTLQRYKELQDIIAILGLDELSEEDRLTVARARKIERFLSQPFFVAEVFTGSPGKYVGLAETIRGFQLILSGELDGLPEQAFYLVGNIDEATAKAMNLEVESNLKK

SEQ ID NO: 241 - protein, 142 aa, Brassica rapa subsp. pekinensis
RQVTFCNRRNGLLKKAYELSVLCDAEVTLIVFSSRGRLYEYSNNSVKGTIERYKKAISDNTNTGTVAEINGQYYQQESAKLRQQIISIQNSNRQLMGETIGSMSPKELRNLEGRLDRSINRIRSKKNELLFAEIDYMQKREL

SEQ ID NO: 242 - protein, 493 aa, Argophyllum sp. Telford 5462
TTSGSGVSTLEKKNPGRIAQIIGPVLDVAFPPGKMPNIYNALVVKGRDTAGQPINVTCEVQQLLGNNRVRAVAMSATDGLTRGMEVIDTGAPLSVPVGGATLGRIFNVLGEPVDNLGPVDTRTTSPIHRSAPAFIQLDTKLSIFETGIKVVDLLAPYRRGGKIGLFGGAGVGKTVLIMELINNIAKAHGGVSVFGGVGERTREGNDLYMEMKESGVINEQNIAESKVALVYGQMNEPPGARMRVGLTALTMAEYFRDVNEQDVLLFIDNIFRFVQAGSEVSALLGRMPSAVGYQPTLSTEMGSLQERITSTKEGSITSIQAVYVPADDLTDPAPATTFAHLDATTVLSRGLAAKGIYPAVDPLDSTSTMLQPRIVGEEHYETAQRVKQTLQRYKELQDIIAILGLDELSEEDRLTVARARKIERFLSQPFFVAEVFTGSPGKYVGLAETIRGFQLILSGELDGLPEQAFYLVGNIDEATAKAMNLEMESNLKK

SEQ ID NO: 243 - protein, 268 aa, Xylella fastidiosa Dixon
MHRIDETFRRLRAQSRKALIPFITAGDPSLEAAVPVMHALVRAGADVIELGVPFSDPMADGPVIQHSSERALQRGVGLAYVLQTVDVFRQSDAVTPVVLMGYLNPLEIYGIARFTQQALASGVDGVLLVDLPPEEADEIRAIFSAAGLALIVLASPTTSASRLATLSGVAQGYLYYVSFAGVTGADRLDAQSAGDRLRGLRAQTQVPVVVGFGIRDAASAVVMAVDADGVVVGSALVTALSDAPDVDTACRRADAFLAPLRQALDAVK

SEQ ID NO: 244 - protein, 496 aa, Glycine max
MATSDSNMLLNYVPVYVMLPLGVVNVDNVFEDPDGLKEQLLQLRAAGVDGVMVDVWWGIIELKGPKQYDWRAYRSLFQLVQECGLTLQAIMSFHQCGGNVGDIVNIPIPQWVLDIGESNHDIFYTNRSGTRNKEYLTVGVDNEPIFHGRTAIEIYSDYMKSFRENMSDFLESGLIIDIEVGLGPAGELRYPSYPQSQGWEFPGIGEFQCYDKYLKADFKAAVARAGHPEWELPDDAGKYNDVPESTGFFKSNGTYVTEKGKFFLTWYSNKLLNHGDQILDEANKAFLGCKVKLAIKVSGIHWWYKVENHAAELTAGYYNLNDRDGYRPIARMLSRHHAILNFTCLEMRDSEQPSDAKSGPQELVQQVLSGGWREDIRVAGENALPRYDATAYNQIILNARPQGVNNNGPPKLSMFGVTYLRLSDDLLQKSNFNIFKKFVLKMHADQDYCANPQKYNHAITPLKPSAPKIPIEVLLEATKPTLPFPWLPETDMKVDG

SEQ ID NO: 245 - protein, 1098 aa, Saccharomyces dairenensis
KRISLEDHAESEYGAIYSVSGPVIVAENMIGCAMYELVKVGHDNLVGEVIRIDGDKATIQVYEETAGVTVGDPVLRTGKPLSVELGPGLMETIYDGIQRPLKAIKDKSQSIYIPRGIDAPALDRKVTWHFNPGKYQVGDHISGGDIFGSIYENSLLEDHKILLPPRARGTITWIAPAGEYTVDEKILEVEFDGKTSDYSMYHTWPVRVPRPVAEKLSADHPLLTGQRVLDALFPCVQGGTTCIPGAFGCGKTVISQSLSKYSNSDTIIYVGCFAKGTQVMMADGSDKSIEEIQIGEQVMGKDGNPRTVIALPRGKETMYEVCHITPHRTTSGENFGVMDYVCSGNHKLVLRTPQNVTLTTHELDGQTYTNVSYFALEESAYGQIVKKKTKSYQHQRHGGKQETEKKVNEFLATINPDSIEWDVEAKDYKKLGYDVKKSSHQMINPVFKESGNLIAKLNELGFSKEIAPQMGWLLGFWVGNGSITTSSFSIDSLDTQLLDRITEYGKLFALTTTSATNHCRNYSGSGNQDIELSKINNGKVETDGTITFDDDTEREPSEQELIDMESSGCKASSEMTVALGAPLVRGNAIRQLLTENNVFLKLIESFGVRKENGSEYVKAIPMHLSYDDIEVREQFIAGLVDSIGHVKRTSNGTIECAAISTAYKSVSEGLIRLARSLGIKVSVTTKRECLDKHNVKHQICYSICLSGATLSGALRFCALDKNNANSKKPFVRGPVPFYFTLKEKDEDNYYGITLPDSTDKQYLLSSLALVHNCGERGNEMAEVLMEFPELFTEQTGRKEPIMKRTTLVANTSNMPVAAREASIYTGITLAEYFRDQGKDVSMIADSSSRWAEALREISGRLGEMPADQGFPAYLGAKLASFYERAGKAVALGSPDRIGSVSIVAAVSPAGGDFSDPVTTATLGITQVFWGLDKKLAQRKHFPSINTSVSYSKYTNVLSKYYDSNYPEFPVLRDRMKEILSNAEELEQVVQLVGKSALSDSDKITLDVANLIKEDFLQQNGYSTYDAFCPIWKTFDMMRSFVAYNDEAQKAIAAGANWSKLSEATNDVKHAVSSSKFFEPSRGEEEIHGEFEKLLNNKQ

SEQ ID NO: 246 - protein, 423 aa, Salmonella typhimurium
  unsure (1)..(423): unsure at all Xaa locations
MTDKRKDGSGKLLYCSFCGKSQHEVRKLIAGPSVYICDECVDLCNDIIREEIKEVAPHRERSALPTPHEIRTHLDDYVIGQEQAKKVLAXAVYNHYKRLRNGDTSNGVELGKSNILLIGPTGSGKTLLAETLARLLDVPFTMADATTLTEAGYVGEDVENIIQKLLQKCDYDVQKAQRGIVYIDEIDKISRKSDNPSITRDVSGEGVQQALLKLIEGTVAAVPPQGGRKHPQQEFLQVDTSKILFICGGAFAGLDKVIANRVETGSGIGFGATVKAKSDKASEGELLSQVEPEDLIKFGLIPEFIGRLPVVATLNELSEEALIQILKEPKNALTKQYQALFNLEGVDLEFRDEALDAIARKAMARKTGARGLRSIVEAALLDTMYDLPSMEDVEKVVIDESVIAGQSKPLLIYGKPEAQASGE

SEQ ID NO: 247 - protein, 313 aa, Oceanobacillus iheyensis HTE831
MRTIELTYPHSLHMEELPKTVSAIGFFDGIHQGHQKVITTAVREAEEKEMDSAVITFHPHPSVVLKKDTQQIQYITTLKEKQDVLQELGVDRLYIITFNEQLSKLSPQEFINHFIVGLHIKHLVAGFDYSFGYKGKGNMNNISDYSNGKFTWQKVEQVSLDEEKISSTRIRKELKAGNVDKVYQLLNRPYQSAGMVIKGAQRGRELGYPTANIDVPNDSLLPRQGIYAVYVWVKNQRYEGMANIGTNPTFTEDRQDVSVEVYIFDYSNDLYGEELIIEWLNYVRPEERFDTVEALINGMKEDEQEIRSYLTRE

SEQ ID NO: 248 - protein, 426 aa, Corynebacterium glutamicum ATCC 13032
MARMQESADLLKCSFCGKSQKQVKKLIAGGAVYICDECIELCNEIIEEELGQAQHDEQERNELPKPSEISAFLDTYVIGQDPAKRILSVAVYNHYKRLRASETIGRRRNDEPETELVKSNILMLGPTGSGKTFLAQTLAKLLDVPFAIADATSLTEAGYVGEDVENILLKLLQAADFDVERAQRGIIYIDEVDKISRKSENPSITRDVSGEGVQQALLKILEGTVAAIPPQGGRKHPNQDFIQLDTTNILFIVAGAFSGLEKVIADRNGKKGLGFGVEVSSKKEEANIVDIFKDVLPEDLVKFGLIPEFIGRLPVVATVSNLDQKSLVKVLTEPRNSLVKQYRRLFEMDDAVLTFTDDALEEIANQALERKTGARGLRAIMEEILVPIMYDLPDRKDVGEVIINGAVARGEAEPEMLEAVAEEKTA

SEQ ID NO: 249 - protein, 467 aa, Berzelia lanuginosa
  unsure (1)..(467): unsure at all Xaa locations
TXEKXXXGRXAQXXGPVLDVXFPPGKMPNIYNALVVKGRDTVGQSINVTCEVQQLLGNNRVRAVAMSATDGLMRGMEVIDTGAPLSVPVGGATLGRIFNVLGEPVDNLGPVDTRTTSPIHRSAPAFIQLDTKLSIFETGIKVVDLLAPYRRGGKIGLFGGAGVGKTVLIMELINNIAKAHGGVSVFGGVGERTREGNDLYMEMKESGVINEQNIAESKVALVYGQMNEPPGARMRVGLTALTMAEYFRDVNEQDVLLFIDNIFRFVQAGSEVSALLGRMPSAVGYQPTLSTEMGTLQERITSTKEGSITSIQAVYVPADDLTDPAPATTFAHLDATTVLSRGLAAKGIYPAVDPLDSTSTMLQPRIVGEEHYEIAQRVKQTLQRYKELQDIIAILGLDELSEEDRLTVARARKIERFLSQPFFVAEVFTGSPGKYVGLAETIXGFXLILSGELDGLPEXAFXXXGXX

SEQ ID NO: 250 - protein, 264 aa, Synechococcus sp. PCC 7002
MTSVSERFRSLKQAGQCALIPFITAGDPDLETTEQALKILDAAGADFIELGVPYSDPLADGPTIQAAATRALSRGVTLEQVLAIVQRVHGQLTAPIILFTYYNPIFYRGIDAFMAQVAAAGVKGLVIPDLPLEESQMVLDAATSHGLDLILLVAPTSPTERIEAIAKASQGFIYLVSVTGVTGARTSVASRVGELLPKLRQVTDKPIGVGFGVSDPAQARQLKEWGADGVIVGSAVVKRLATGTPAEGLAAVKEFCESLKEAIA

SEQ ID NO: 251 - protein, 250 aa, Rhodopseudomonas palustris
MPGMSARGCEGEPQVVTGAHDWLIAAVLLDMDGTLVDTERLYLESLTEVLNAFGLPDAIETCESMVGLPGPECQALLVARYGETLPLREINRAFVEKRDARFAQGLPVKPGTCELLDALDDAGCPVAVVTSSSRKTADMHLTLAGIRARFATILTRDDVVHGKPAPDLYLLAANRLGVPPAHCVAVEDSSVGVASAFTAGAITLMVPDLLQPDDATRGKCAAVLPDLNAVRSLLEIRGRFAAPDAALAPR

SEQ ID NO: 252 - protein, 467 aa, Nicotiana tabacum
MATFTLPSLFILLSLLSVAHSGSIGINYGRIANNLPSPAQVVQLLKTQGVNRIKLYDTDSNVLTALSGSNISVTVALPNEQLSDAAEKQSFTDSWVQSNILTYYPKTLIESIAVGNEVFVDPKNTTKFLVPAMKNVYASLVKYGVAESIKVSSPVALSALGNSYPSSAGSFKPDLVEPVIKPMLSFLKQTGSYLMVNIYPFFAYAANTDTISLDYALFKDNKGVTDPNNGLVYKSLFEAQIDAVYAALKAVGFGDVAMAVSETGWPSKGDENEAGAGADNAAAYNGNLVRRVLTGSGTPLKPNEPLDVFLFALFNENQKPGPTSERNYGLFYPNEQKVYDITLTKDGLGNGPTMNNGSKSTVVTAPEPALEASKVGNTWCVANEKAAREKLQAALDYACGEGGADCRPIQQGATCYDPDTLEAHASYAFNSYYQKNTRGVSTCDFSGAAYVVTQHPKYGSCKFPTGY

SEQ ID NO: 253 - protein, 268 aa, Escherichia coli
MERYESLFAQLKERKEGAFVPFVTLGDPGIEQSLKIIDTLIEAGADALELGIPFSDPLADGPTIQNATLRAFAAGVPPAQCFEMLALIRQKHPTIPIGLLMYANLVFNKGIDEFYAQCEKVGVDSVLVADVPVEESAPFRQAALRHNVAPIFICPPNADDDLLRQIASYGRGYTYLLSRAGVTGAENRAALPLNHLVAKLKEYNAAPPLQGFGISAPDQVKAAIDAGAAGAISGSAIVKIIEQHINEPKKMLAALKAFVQPMKAATRS

SEQ ID NO: 254 - protein, 239 aa, Agrobacterium tumefaciens str. C58 (Cereon)
MRDGTGPLLIFDCDGVLVDSEPVSIAVLLDMLSHLGVTMGEEEAYERFLGRSVASMTTTLFEEYGVETDIDFLDHMRATLFERFRTELKPIDGIAETLDELLPLKRCVASSSQPERIRYSLGLTGLIDKFEPHVFSATMVRNGKPAPDLFLHAARSMGVEPRQCIVIEDSPAGIAAAKAAGMGVFAFTGGSHARFPAFREKIAGLGADAVFDAMPDLVQLVGSYVGRGGFDGQVERDAG

SEQ ID NO: 255 - protein, 213 aa, Clostridium thermocellum ATCC 27405
MDGLMIDTERLYFEVERIMARKFGKEVKDETLWKMMGRKPLEAITVFAEDLELDISPKKLLEIRDELFVKKLVNEVEPMPGLFDILNILKGKVKMAIATGSPQKFLKIVLDKLKIESYFDVFVTSDEVEKGKPDPEVYNTAVKRLKVAPFECVVLEDSSNGALAAVRAGCYTIAVPTVYTNKQDFSFVNYVAKDLKDAAEKINEFLCSQEIEF

SEQ ID NO: 256 - protein, 450 aa, Primula gaubaeana
  unsure (1)..(450): unsure at all Xaa locations
DVSFPAGKMPNIYNALVVKGRDTAGQPINVPCEVHQLLGNNRVRAVAMSATDGLTRGMEVIDTGAALSVPVGGATLGRIFNVLGEPVDNLGPVDTRTTSPIHRSAPAFIQLDTKLSIFETGIKVVDLLAPYRRGGKIGLFGGAGVGKTVLIMELINNIAKAHGGVSVFGGVGERTREGXDLPMEMKESGVINEENIAESKVALVYGQMNEPPGARMRVGLTALTMAEYFRDVNEQDVLLFIDNIFRFVQAGSEVSALLGRMPSAVGYQPTLSTEMGSLQERITSTKEGSITSIQAVYVPADDLTDPAPATTFAHLDATTVLSRGLASKGIYPAVDPLDSTSTMLQPRIVGEEHYEIAQRVKETLQRYKELQDIIAILGLDELSEEDRLTVARARKIERFLSQPFFVAEVFTGSPGKYVGLAEXLRGFQLILSGKLDSLPEQAFYLVGNID

SEQ ID NO: 257 - protein, 586 aa, Lactobacillus plantarum WCFS1
MKKTKIVSTLGPASTDTDTIVKLIEAGANIFRFNFSHGDHEEHLDRLNKVHEAEKITGKTVGIMLDTKGAEIRTTVQANGKSEYKIGDKVRITMDDSLDTTHDKIAVTYKNLYDDVHVGGHVLFDDGLLDMKIDEKDEANRELVTTVQNAGVLGSRKGVNAPGVSINLPGITEKDSSDIRFGLDHEINYIAASFVRKPQDVLDIRELLEEKHMEHVQIFPKIESQEGIDNADEILKVCDGLMVARGDMGVEIPAENVPLVQKSLIKKCNALGMPVITATQMLDSMQENPRPTRAEASDVANAVFDGTDATMLSGESANGLYPVESVAMMAKIDEKAENTLAENGTLQLNRFDKTSVTETIGIAIARAAKNLNIKTIVAATESGYTAKMISKYRPNADILAITFDERTQRGLMVNWGVQPIVAEKPETTDDMFDLAASKAVELGFAKEGDLILITAGVPVGERGTTNIMKIQLIGSKLADGQGVGDETVIGKAVIATSAQEAIDKAVEGGVLVTKTTDKDYLPAIEKSSALVVENGGLTSHAAVVGISMGIPVIVGVKDATSVIADGQLITVDSRRGLVYRGASNAL

SEQ ID NO: 258 - protein, 498 aa, Ipomoea batatas
APIPGVMPIGNYVSLYVMLPLGVVNADNVFPDKEKVEDELKQVKAGGCDGVMVDVWWGIIEAKGPKQYDWSAYRELFQLVKKCGLKIQAIMSFHQCGGNVGDAVFIPIPQWILQIGDKNPDIFYTNRAGNRNQEYLSLGVDNQRLFQGRTALEMYRDFMESFRDNMADFLKAGDIVDIEVGCGAAGELRYPSYPETQGWVFPGIGEFQCYDKYMVADWKEAVKQAGNADWEMPGKGAGTYNDTPDKTEFFRPNGTYKTDMGKFFLTWYSNKLIIHGDQVLEEANKVFVGLRVNIAAKVSGIHWWYNHVSHAAELTAGFYNVAGRDGYRPIARMLARHHATLNFTCLEMRDSEQPAEAKSAPQELVQQVLSSGWKEYIDVAGENALPRYDATAYNQMLLKLRPNGVNLNGPPKLKMSGLTYLRLSDDLLQTDNFELFKKFVKKMHADLDPSPNAISPAVLERSNSAITIDELMEATKGSRPFPWYDVTDMPVDGSNPFD

SEQ ID NO: 259 - protein, 470 aa, Arabidopsis thaliana
MLDLQPSDRRHGAPSSSGGVSGGDELIRTYKGWKGNNVFFLGGRLVFGPDARSILITVFLITAPVIVFCIFVGRKFIDDFPHHRGVSVLAVADLVFLLLTSARDPGIIPRNLYPPEPESNEGNGEPRLAHTPQSRLPRTKDMIVNGITVKIKYCDTCMLYRPPRASHCSICNNCVEKFDHHCPWLGQCIGLRNYRFYFMFVLCSTLLCIYVHVFCWIYVKRIMDSENINIWKSFLKTPASIALIIYTFICVWFVGGLTCFHLYLMSTNQSTYENFRYRYDRHENPFNKGIVGNFMEVFCTNVAVSQNSFREKVSKEPAIPPRTVNGGMSSPSLQKVSNDIEMGRKPVWHETVEEELGDIEKDMEAGVASRDLSRMLPPEESEGRGIMHSRESSRGRGIMHSRESSRGRRGGSWELSSRVNEDLRTRDESVSRVGEDSSESSDNDASRDLHVEIYDAVTSRGRTGTGIGRL

SEQ ID NO: 260 - protein, 852 aa, Oryza sativa (japonica cultivar-group)
MDLFVAIALGLERMVRRNSDTTSKRVDQINSKWQFHLSIDDNTDSSCLFKERLTQALRYFKESTDQHLLVQVWAPVKSGDRYVLTTSGQPFVLDQQSIGLLQYRAVSMMYMFSVDGENAGELGLPGRVYKQKVPEWTPNVQYYSSTEYPRLNHAISYNVHGTVALPVFDPSVQNCIAVVELIMTSKKINYAGEVDKVCKALEAVNLKSTEILDHPNVQICNEGRQSALVEILEILTVVCEEHKLPLAQTWVPCKYRSVLAHGGGVKKSCLSFDGSCMGEVCMSTSDVAFHVIDAHMWGFRDACVEHHLQKGQGVSGKAFIYRRPCFSKDISQFCKLEYPLVHYARMFGLAGCFAICLQSMYTGDDDYILEFFLPPNCRNEDDQNALLESILARMKKCLRTLKVVGNGDTNEVCLQISNVLIIETEDLKTNVHFENSEGCFRESPESNGSQRVHEVDNDGNKVSIMSERHLLADDNSQNNGASVGRPNGSGASDSLHKSNKPPERRRGKAEKTISLDVLQQYFSGSLKNAAKSLGVCPTTMKRICRQHGISRWPSRKINKVNRSLSKLKQVIESVQGSDAAFNLTSITGPLPIPVGPSSDSQNLEKASPNKVAELSNLAVEGDRDSSLQKPIENDNLAILMSQQGFIDANNNLQLEADKASHSRSSSGEGSINSRTSEASCHGSPANQTFVCKPIASTFAEPQLIPEAFTKEPFQEPALPLSRMLIEDSGSSKDLKNLFTSAVDQPFLARSSNLALMQNSGTVTIKASFKEDIVRFRFPCSGSVTALKDEVAKRLRMDVGMFDIKYLDDDHEWVKLACNADLEECMEISGSHVIRLLVSDVAAHLGSSCGSSG

SEQ ID NO: 261 - protein, 281 aa, Methanocaldococcus jannaschii
MIMKLAEKFEELKNKGEKAFVAFYVGGDPNLEISEKALEVICKHADIVEIGIPFSDPVADGITIQKADVRALNSGMNPLKAFELAKKLNEKAPNVPKVFLTYYNIIFKMGEEEFVKKCKEAGVSGIIVPDLPIEEADSLYNYCKKYGVDLIFLVAPTTPDERLKKILEKCSGFVYVVSVTGITGAREKVAEETKELIKRVKKFSKIPACVGFGISKREHVEEITEIADGAIVGSAIVKIVEKHLDENGQIKDEEKFLKELEEFVKNLKEGTKKKAKVAIKN

SEQ ID NO: 262 - protein, 242 aa, Shigella sonnei
LKERKEGAFVPFVTLGDPGIEQSLKIIDTLIEAGADALELGIPFSDPLADGPTIQNATLRAFAAGVTPAQCFEMLALIRQKHPTIPIGLLMYANLVFNKGIDEFYAQCEKVGVDSVLVADVPIEESAPFRQAALRHNVAPIFICPPNADDDLLRQIASYGRGYTYLLSRAGVTGAENRAALPLNHLVAKLKEYNAAPPLQGFGISTPDQVKAAIDAGAAGAISGSAIVKIIEQHINEPEKML

SEQ ID NO: 263 - protein, 285 aa, Pisum sativum
MNDHQECEVRQNDKPVRVYADGIYDLFHFGHARSLEQAKKSFPNTYLLVGCCNDETTHKYKGKTVMTEAERYESLRHCKWVDEVIPDVPWVINQEFIDKHQIDYVAHDSLPYADTSGAGKDVYEFVKAIGKFKETQRTEGISTSDIIMRIIKDYNQYVMRNLDRGYSRKDLGVSYVKEKRLRMNMGLKKLQERVKKQQETVGKKIGTVKKIAGMNRTEWVENADRLVAGFLEMFEEGCHKMGTAIRDRIQEQLKAQQLRSLLYDEWDDDVDDEFYENESVEYYSD

SEQ ID NO: 264 - protein, 1443 aa, Saccharomyces kluyveri
SNFSGCTNDLHVSDIPSTVERQKSLYPSWNDDAPLTENEIQSILTGLQRAFQFQKDNVSNIYDYLMSMLDSRASRMGPMEALNSLYQDYVGVRGSNFMKWYASSRIDVIGGAKDKELFGDAKPGWAKSTAPSDLILQVSLYLLCWGEANHVRFMPECLCFIFKVCCDYYYYSYCHDMKTGRVPWAGKRPLPFLDHVITPLYNFHKSQQCSLNGDVASLKDHSKVIGYDDINQFFWHREDLDRLKLQNNTLLNTIPIEQHYLFLNQIDWSRCFYKTYYESRTWFHVVTNFNRIWIIHLSVFWYYTTFNSKPIYTQYYDQTIDNQPTIQCTLSALSIAGVIATLVNLFATIGELLFVPRKFPGALTLTLGRRIFILMGILFLNLSPSIYIFGVHPWNTVTKIGLTLAVCQFVLSLVTVAYFSVVPLQHLFTMSNGEEQSPEQSFVNFIVPLQRRNHLASVFFWTLVFASKFVESYFFLTLSLKDPIRELSSIASKHCDIDSFVSGMVCQFQPKVLLAMMILTDAVLFFLDTYLWYVIFSTFFSTARSFYLGISIWTPWRNVFSKLPKRIFSKIIFSNQCHHYSCGQQQVAKVWNEIIWSMYREHLISDEHVQKLVYHQIATPDQTNGCMVEEPAFLHFQEEHFFKSSLFHSHRSAKRRITFFARSLVCPMPETSSVENMPVFTVLIPHYNEKILLSIREIVKEEDEYSHVTLLEYLKSLYRNEWMCFVAETRRLAEESFEENSKEDLASSTSPSLPTIVGDKPSTLSYSFAGFKTATSDFILRTRMWTSLRTQTLFRTVSGFMNYSKAISLLHSVEKSPKHTPESADFVALHKFRMVVSMQKMNSFGKEDIENRDHLLRLYPHLQIAYIDEEYDPDNGKKTYYSALIDGHCEILESGQRKPRYRIRLSGNPILGDGKSDNQNHAIIFGRGEYIQLVDANQDNYLEECLKIKSVLKEFEYDSNFLPTDVEGSNSPPVAIVGTREYIFSEKIGVLEDIAAGKEQVFGTLFARTLSYLGGKLHYGHPDFLNVAFLTTRGGVSKAQKGLHLNEDIYTGMDSVMRGGIIKHCEYNQCGKGRDLGFGSILNFTTKIGAGMGEQLLSREYYYFGTLLPLDRFLTFYYAHPGFHLNNVLIMFSIKLFIIFMINLAVLIHESVLCQYNSQLEIIEPRIPMGCVNLISVVFWLRRSILSILAVSSISFFPLFVQELSDSGAQKAVTRIVKHFFSLAPIFEVFVCKVFAGSLVNDLLYGGARYISTGRTYSTVRVPFASLYSRFAPETFYFSTSFILLLLYSSMVIWDPSFLYFWFTIVSLLISPFIFNPNQFMWSDFLVDYREYLRWLFRIDTNPNNLAWKGFVRGFGTDAMGKKTRRLLKFGNRLNSDLKRPTLQGRLFSDVLPDFLFTILVLIPFLFLGYQAQNPSHEFSNPLLRVAIVSILPIACNSVMLLA

SEQ ID NO: 265 - protein, 483 aa, Synechocystis sp. PCC 6803
MVAVKEATNVGKITQVIGPVIDAQFPSGKLPRIYNALKVQGRNSAGNEVAVTCEVQQLLGDNQVRAVAMSSTDGLVRGMDVVDTGAPISVPVGTGTLGRIFNVLGEPVDNKGPVPAGETFPIHRPAPKLVDLETKPQVFETGIKVIDLLTPYRQGGKIGLFGGAGVGKTVIMMELINNIAIQHGGVSVFGGVGERTREGNDLYNEMIESNVINADKPEESKIALVYGQMNEPPGARMRVGLTALTMAEYFRDVNKQDVLLFIDNIFRFVQAGSEVSALLGRMPSAVGYQPTLGTDVGDLQERITSTKEGSITSIQAVYVPADDLTDPAPATTFAHLDGTTVLSRGLAAKGIYPAVDPLDSTSTMLQPSIVGSEHYDTAREVQSTLQRYKELQDIIAILGLDELSEEDRLTVDRARKIERFLSQPFFVAEVFTGAPGKYVSLADTIKGFKAILAGELDDLPEQAFYLVGDIEEAKAKGAKLKEG

SEQ ID NO: 266 - protein, 463 aa, Bacillus anthracis str. Ames
MHLHFTPRQIVEKLDQYIIGQKDAKKAVAVALRNRYRRSKLAENLRDEIAPKNILMIGPTGVGKTEVARRMAKLVGAPFIKVEATKFTEVGYVGRDVESMVRDLVETSVRIVKEEMVVKVQDKAEEQANQRLVEILVPSPEKQSGFKNPLEMLFGGTQNSNQTTDSQEDVEIEKKRQDVERKLAAGLLEDEIVSIEVTEQQSSMFDMLQGTGMEQMGMNFQDALGSFMPKKTKKRKLSVKEARKVLTNEEAQRLIDMDEVTQEAVYRAEQLGIIFIDEIDKIAGKQSNSVDVSREGVQRDILPIVEGSNVATKYGSVKTDYILFVAAGAFHMSKPSDLIPELQGRFPIRVELTKLSTDDFVKILIEPDNALIKQYMALLATEGIEIEFSDEAIRKIAEIAYQVNQDTDNIGARRLHTIMEKLLEDLSFEASEITLEKITITPQYVEEKLATIAKNKDVSQFIL

SEQ ID NO: 267 - protein, 496 aa, Riedelia aff. wrayii SBG 83-203
MRTNPTTSSPVVSTLEEKNLGCIAQIIGPVLDVVFPPGKMPNIYNALVVKGRDTVGQQINVTCEVQQLLGNNRVRAVAMSATDGLTRGMEVIDTGAPLSIPVGGATLGRIFNVLGEPVDNLGPVDTSTTSPIHRPAPAFIELDTKLSIFETGIKVVDLLAPYRRGGKIGLFGGAGVGKTVLIMELINNIAKAHGGVSVFGGVGERTREGNDLYIEMKESGVINEKNIAESKVALVYGQMNEPPGARMRVGLTALTMAEYFRDVNEQNVLLFIDNIFRFVQAGSEVSALLGRMPSAVGYQPTLSTEMGSLQERITSTKKGSITSIQAVYVPADDLTDPAPATTFAHLDATTVLSRGLAAKGIYPAVDPLDSTSTMLQPRIVGEEHYETAQRVKQTSQRYKELQDIIAILGLDELSEEDRLTVARARKIERFLSQPFFVAEVFTGSPGKYVGLAETIRGFQLILSGELDSLPEQAFYLVGNIDEATAKAINLEEEGKL

SEQ ID NO: 268 - protein, 180 aa, Bacillus subtilis
MFNLHDSEKLFIPFITAGDPLPEISVELAKSLQNAGASALEIGVPYTDPLADGPVIQRASKRALENGMNIVKAIELGGKMKKNGVHIPIILFTYYNPVLELEKECFFALLRENDIDGLLVPDLPLEESALLQKTCKKENIAYISLVAPTSENRLKIITEQAGGFVYCVSSLGVTGVRSEF

SEQ ID NO: 269 - protein, 332 aa, Beta vulgaris
MPAVYGDRMTTFEDSEKESEYGYIRKVSGPVVVADGMNGAAMYELVRVGHDNLIGEIIRLEGDSATIQVYEETGGLTVNDPVLRTHKPLSVELGPGILGNIFDGIQRPLKTIAKRSGDVYIPRGVSVPPLDKDTQWDFQPKKLGVGDLLTGGDLYAIVDENSLMQHHVALPPDAMGKITYIAPAGNYTIQDTVLELEFQGVVKKFTMLQTWPVRTPRPVASKLAADTPLLTGQRVLDALFPSVLGGTCAIPGAFGCGKTVISQALSKYSNSDAVVYVGCGERGNEMAEVLMDFPQLTMTLPDGREESVMKRTTLVANTSNMPVAAREASIYT

SEQ ID NO: 270 - protein, 591 aa, Oryza sativa
MLEKKATRSTRVDGVSGEAVIEEFERVTRDAANVQRETLRRILAENGGVEYLRGLGLAGATDPATFRARVPLATHADLEPYIDRIADGDASPVLTAKPATSISLSSGTTQGKRKYLLFNEELVKSTMQIYRISYAFRNREFPVENGKALQFIYSSRETRTKGGLTATTATTNVYRSEEFKATMRDIQSQCCSPDEVIFGPDFAQSLYCHLLAGLLAAGDVQIVSATFAHSVVLAFQTFERAWEDLCADIRRGEVSPSRVTSPAVRRAMAALLAAPNPGLADEVARKCAALSNWYGVIPALWPNARYVYGIMTGSMEHYVKKLRHYAGGLPLVAAEYGASEGWVGANVEPGTPPERATFTVLPDIAYFEFIPLKPVAGDGGYAEAEPVGLTEVAAGELYEVVMTTFAGLYRYRLGDVVKVAGFYNATPKLKFVCRRNLMLSINIDKNSEQDLQLAVDAAARAVLAGEKLEVVDYTSHADVSSDPGHYVVFLELNAADPAAVDGDVMQACCDELDRAFADAGYVGSRKSGAIAPLELRVLQRGTFQKVLRHYLSLGAPVSQFKSPRCVSRSNSGVLQILAGCTVNVFFSSAYD

SEQ ID NO: 271 - protein, 499 aa, Ipomoea batatas
MAPIPGVMPIGNYVSLYVMLPLGVVNADNVFPDKEKVEDELKQVKAGGCDGVMVDVWWGIIEAKGPKQYDWSAYRELFQLVKKCGLKIQAIMSFHQCGGNVGDAVFIPIPQWILQIGDKNPDIFYTNRAGNRNQEYLSLGVDNQRLFQGRTALEMYRDFMESFRDNMADFLKAGDIVDIEVGCGAAGELRYPSYPETQGWVFPGIGEFQCYDKYMVADWKEAVKQAGNADWEMPGKGAGTYNDTPDKTEFFRPNGTYKTDMGKFFLTWYSNKLIIHGDQVLEEANKVFVGLRVNIAAKVSGIHWWYNHVSHAAELTAGFYNVAGRDGYRPIARMLARHHATLNFTCLEMRDSEQPAEAKSAPQELVQQVLSSGWKEYIDVAGENALPRYDATAYNQMLLNVRPNGVNLNGPPKLKMSGLTYLRLSDDLLQTDNFELFKKFVKKMHADLDPSPNAISPAVLERSNSAITIDELMEATKGSRPFPWYDVTDMPVDGSNPFD

SEQ ID NO: 272 - protein, 222 aa, Pinus resinosa
MGRGKIEIKRIENTTNRQVTFCKRRNGLLKKAYELSVLCDAEVALIVFSSRGRLYEFANHSVKRTIERYKKTCVDNNHGGAISESNSQYWQQEAGKLRQQIEILQNANRHLMGDGLTALNIKELKQLEVRLEKGISRVRSKKNEMLLEEIDIMQRREHILIQENEILRSKIAECQNSHNTNMLSAPEYDALPAFDSRNFLHANLIDAAHHYAHQEQTTLQLG

SEQ ID NO: 273 - protein, 456 aa, Acer saccharum
IGPVLDVAFPPGKMPNIYNALIVKGRDTVGQPINVTCEVQQLLGNNRVRAVAMSATDGLMRGIEVIDTGAPLSVPVGGATLGRIFNVLGEPVDNLGPVDTRTTSPIHKSAPAFIQLDTKLSIFETGIKVVDLLAPYRRGGKIGLFGGAGVGKTVLIMELINNIAKAHGGVSVFGGVGERTREGNDLYMEMKESGVINEQNLAESKVALVYGQMNEPPGARMRVGLTALTMAEYFRDVNEQDVLLFIDNIFRFVQAGSEVSALLGRMPSAVGYQPTLSTEMGSLQERITSTKEGSITSIQAVYVPADDLTDPAPATTFAHLDATTVLSRGLAAKGIYPAVDPLDSTSTMLQPRIVGEEHYETAQRVKQTLQRYKELQDIIAILGLDELSEEDRLTVARARKIERFLSQPFFVAEVFTGSPGKYVGLAETIRGFKLILSGELDSLPEQAFYLVGNIDE

SEQ ID NO: 274 - protein, 500 aa, Streptococcus pyogenes MGAS315
MNKRVKIVATLGPAVEIRGGKKYGEDGYWAGQLDVEESAKKIAELIEAGANVFRFNFSHGDHKEQGDRMATVRLAEEIARQKVGFLLDTKGPEMRTELFADDAKEFSYVTGEKIRVATTQGIQSTRDVIALNVAGSLDIYDEVEVGHTILIDDGKLGLKVIDKDIATRQFIVEVENDGIIAKQKGVNIPNTKIPFPALAERDNADIRFGLEQGLNFIAISFVRTAKDVEEVREICRETGNDHVQLFAKIENQQGIDNLDEIIEAADGIMIARGDMGIEVPFEMVPVFQKMIITKVNAAGKAVITATNMLETMTEKPRATRSEVSDVFNAVIDGTDATMLSGESANGKYPVESVRTMATIDRNAQTLLNEYGRLDSSAFPRTNKTDVIASAVKDATHSMDIKLVVTITETGNTARAISKFRPDADILAVTFDEKVQRALMINWAVIPVLAEKPASTDDMFEVAERVAVEAGLVQSGDNIVIVAGVPVGTGGTNTMRVRTVK

SEQ ID NO: 275 - protein, 279 aa, Agrobacterium tumefaciens str. C58
MTVRMDKRFADLRAENRPALITYFMGGDPDFQTSLGIMKALPEAGADVIELGMPFSDPMADGPAIQLAGQRALKGGQTLKTTLDLAREFRKQDNATPIVMMGYYNPIYIYGVEKFLDDAIASGIDGLIVVDLPPEMDDELCIPALARGINFIRLATPTTDGKRLPAVLKNTSGFVYYVSMNGITGSALPDPSLISGAVGRIKAHTELPVCVGFGVKTADHAKAIGAVADGVVVGSAIVNQIAGSLTKDGQATADTVPAVTTLVKGLSTGVRASRLAAAE

SEQ ID NO: 276 - protein, 270 aa, Nostoc sp. PCC 7120
MPTISDHFQSLRQRQQCALIPFITAGDPDLQTTAEALRILDRHGADFIELGVPYSDPLADGPVIQAAATRALQRGTKLEQVLEMLETVIPSLQAPIILFTYYNPILHRGIQSFLETIAAVGVRGLVVPDLPLEEAEELIKTAANFGIEVILLVAPTSSQNRIEAIARQSQGFIYLVSVTGVTGIRSQIQDRVQHLITDLRHVTDKPIGVGFGISAPEQARQVKEWGADAVIVGSAFVKRLAEGSPSQGLQAVEKLCQELKTAITRVEARV

SEQ ID NO: 277 - protein, 490 aa, Neisseria meningitidis Z2491
MNQTSRDLTRISHNTKIVATLGPGSNNVELLEDMIRVGGLNVVRFNFSHGTPEFHQENARIVREAAKRTGQEIAIIADLQGPKIRVGKIAGGGIELNKGETLGLDAALEGEGTREAVGLDYRDLPDDVAAGDVLWLDDGLLTLTVESVEGSRIITRVENSHVLKSNKGINKRGGGLSAGALTEKDFRDLKTAIAIGCDYLAISFVKSAEDLHIARAKVEEEMKGSTAVRPGLVSKIERVEAIENLDEIILAGDGIMVARGDLAVEVGHAAVPALQKRMIRRARELRRFSITATQMMESMITNPVPTRAEVSDVANAVLDGTDAVMCSAETAVGAYPFETVSQMAIICAAAEKEQDSLNGVAEQVEYPEAVSTNLAVAGGAVSVARAVHAKAIVALTESGSTAFEISRHNITLPIFALTPSVSAQRRMAMYRGVRPLILATSTDHDTALNEVETMLVEHNILHSGDQYIITSGSQMRESGSTNTLEVLRVK

SEQ ID NO: 278 - protein, 349 aa, Arabidopsis thaliana
KPVFCGNFEYDAREGDLERLFRKYGKVERVDMKAGFAFVYMEDERDAEDAIRALDRFEFGRKGRRLRVEWTKGERGGDKRSGGGSRRSSSSMRPSKTLFVINFDADNTRTRDLEKHFEPYGKIVNVRIRRNFAFIQYEAQEDATRALDASNNRKLMDKVISVEYAVKDDDARGNGHSPERRRDRSPERRRRSPSPYKRERGSPDYGRGASPVAAYRKERTSPDYGRRRSPSPYKKSRRGSPEYGRDRRGNDSPRRRERVASPTKYSRSPNNKRERMSPNHSPFKKESPRNGVGEVESPIERRERSRSSPENGQVESPGSIGRRDSDGGYDGAESPMQKRRSPRSPPADE

SEQ ID NO: 279 - protein, 486 aa, Morus nigra
  unsure (1)..(486): unsure at all Xaa locations
RINPTXXCSGVPALEKKNLGRIAQIIGPVLDVAFPPGKMPNIYNALVVXGRDTVGQQINVTCEVQQLLGNNRVRAVAMSATDGLMRGMEVIDTGAPISVPVGGATLGRIFNVLGEPIDNLGPVDTRTTSPIHRSAPAFIQLDTXLSIFETGIKVVDLLAPYRRGGKIGLFGGAGVGKTVLIMELINNIAKAHGGVSVFGGVGERTREGNDLYMEMKESGVINEQNIAESKVALVYGQMNEPPGARMRVGLTALTMAEYFRDVNEQDVLLFIDNIFRFVQAGSEVSALLGRMPSAVGYQPTLSTEMGSLQERITSTKEGSITSIQAVYVPADDLTDPAPATTFAHLDATTVLSRGLAAKGIYPAVDPLDSTSTMLQPRIVGEEHYETAQRVKQTLQRYKELQDIIAILGLDELSEEDRLTVARARKIERFLSQPFFVAEVFTGSPGKYVGLAETIRGFKLILSGELDGLPEQAFYLVGNIDEATAKA

SEQ ID NO: 280 - protein, 501 aa, Saccharomyces kluyveri
MESRLGWLTELQTETGANLRRTSIIGTIGPKTNNPETLVALRKAGLNIVRMNFSHGSYEYHQSVIDNARKSEELYPGRPLAIALDTKGPEIRTGTTTNEVDYPIPPNHEMIFSIDDKYAKACDDKVMYIDYKNITKVIEKGKIIYVDDGVLSFEVLEVVDEQTLKVKSLNAGKICSHKGVNLPGTDVDLPALSEKDKSDLRFGVKNGVHMVFASFIRTAQDVLTIREVLGEDGKDVKIIVKIENQQGVNNFDEILKVTDGVMVARGDLGIEIPAPQVFAVQKKLIAKCNLAGKPVICATQMLESMTYNPRPTRAEVSDVGNAVLDGADCVMLSGETAKGNYPINAVTIMAETALIAEQAIPYVATYDDLRNFTPKPTSTTETIAAAAVSSVFEQKAKAIIVLSTTGDTPRLVSKYKPNVPIVMVTRNPRAARFSHLYRGVFPFVYESDTESEWTKDVESRLNFGIAKAKEFGMLKEGDTIVTIQGFAAGVGHSNTLRVLTV

SEQ ID NO: 281 - protein, 1088 aa, Candida tropicalis
MAGALENARKEIKRLSLDDTNESQYGQIYSVSGPVVIAENMIGCAMYELVKVGHDNLVGEVIRINGDKATIQVYEETAGVTVGDPVLRTGKPLSVELGPGLMETIYDGIQRPLKAIKDESQSIYIPRGIDVPALSRTVQYDFTPGQLKVGDHITGGDIFGSIYENSLLDDHKILLPPRARGTITSIAEAGSYNVEEPVLEVEFDGKKHKYSMMHTWPVRVPRPVAEKLTADHPLLTGQRVLDSLFPCVQGGTTCIPGAFGCGKTVISQSLSKFSNSDVIIYVGCFTKGTQVMMADGADKSIESIEVGDKVMGKDGMPREVVGLPRGYDDMYKVRQLSSTRRNAKSEGLMDFTVSADHKLILKTKQDVKIATRKIGGNTYTGVTFYVLEKTKTGIELVKAKTKVFGHHIHGQNGAEEKAATFAAGIDSKEYIDWIIEARDYVQVDEIVKTSTTQMINPVHFESGKLGNWLHEHKQNKSLAPQLGYLLGTWAGIGNVKSSAFTMNSKDDVKLATRIMNYSSKLGMTCSSTESGELNVAENEEEFFNNLGAEKDEAGDFTFDEFTDAMDELTINVHGAAASKKNNLLWNALKSLGFRAKSTDIVKSIPQHIAVDDIVVRESLIAGLVDAAGNVETKSNGSIEAVVRTSFRHVARGLVKIAHSLGIESSINIKDTHIDAAGVRQEFACIVNLTGAPLAGVLSKCALARNQTPVVKFTRDPVLFNFDLIKSAKENYYGITLAEETDHQFLLSNMALVHNCGERGNEMAEVLMEFPELFTEISGRKEPIMKRTTLVANTSNMPVAAREASIYTGITLAEYFRDQGKNVSMIADSSSRWAEALREISGRLGEMPADQGFPAYLGAKLASFYERAGKATALGSPDRVGSVSIVAAVSPAGGDFSDPVTTSTLGITQVFWGLDKKLAQRKHFPSINTSVSYSKYTNVLNKYYDSNYPEFPQLRDKIREILSNAEELEQVVQLVGKSALSDSDKITLDVATLIKEDFLQQNGYSSYDAFCPIWKTFDMMRAFISYYDEAQKAIANGAQWSKLAESTSDVKHAVSSAKFFEPSRGQKEGEKEFGDLLTTISERFAEASE

SEQ ID NO: 282 - protein, 802 aa, Thermobifida fusca
MGRQIEPRAAQRPRAASLERLRSTYHRTPLRTRLLAGLGIVLAAAVVAVLTQLSVWATVTGTVLLLALFTAFMHSAGALATAVVCVGWTVVAHTLMSIPLHGQPALLLIPLLPLPVALVAARISAFPVWHTTLVTLLGGLIVGFGLALAHMTIPAVPASLGVAGMVLGAAVTLLWRWVAARQLTKELDRYRQEGRAAAAAGPAVPAAQRARARGGKGSAGKGEVAAEEPIPVTEALAQLESMIGLEPVKQQVRAIAAAIEAARLRADAGYSVDRPLRHFVFSGPPGTGKTSVARTLATIFHSFGLLPTARVVEASRADLVGEYLGATAIKTNELVDRALGGVLFIDEAYSLVNEGDGQPDRFGNEAVQTLLKRAEDDRDRLVIILAGYEAEMDRFLASNPGLASRFATRISFPSYTADELRRIAESFFARRGDRLDEAAAAELAERMEQVVQRGVVDELGNGRFARSLVEKAAEARDVRVVTRESSGKRPDPEELVTVRAADIVAAYEALTARLPGFTPPPDITEALAELDAMVGLEPVKRQVRAIAAQLRMARLREGQGLRVPAPMRHFVFVGPPGTGKTTVARILGRVFAALGLLTRADVVEASRADLVGEHLGATAIKTNQLVDRALGGVLFIDEAYSLVNPGYSGGDAFGSEAVQTLLKRAEDDRDRLVIVLAGYPEDMDRFLHSNAGLASRFTVRVAFPSYTPQELIEIAERTAAQTGDSFDEGARADMERVFSYVCESGWIDELGNGRFARSLFEKACSYRDLRVAENLGERASAADLTTITSADLRAAYTELTQR

SEQ ID NO: 283 - protein, 408 aa, Streptococcus agalactiae 2603V/R
MAGNRNNDMNVYCSFCGKSQDEVKKIIAGNGVFICNECVALSQEIIKEELAEEVLADLAEVPKPKELLEILNQYVVGQDRAKRALAVAVYNHYKRVSYTESSDDDVDLQKSNILMIGPTGSGKTFLAQTLAKSLNVPFAIADATSLTEAGYVGEDVENILLKLIQAADYNVERAERGIIYVDEIDKIAKKGENVSITRDVSGEGVQQALLKIIEGTVASVPPQGGRKHPNQEMIQINTKNILFIVGGAFDGIEDLVKQRLGEKVIGFGQTSRKIDDNASYMQEIISEDIQKFGLIPEFIGRLPVVAALELLTAEDLVRILTEPRNALVKQYQTLLSYDGVELEFDQDALLAIADKAIERKTGARGLRSIIEETMLDIMFEIPSQEDVTKVRITKAAVEGTDKPVLETA

SEQ ID NO: 284 - protein, 758 aa, Pisum sativum
MWRLKIAEGGNDPYLFSTNNFVGRQTWEYDPEAGSEEERAQVEEARRNFYNNRFEVKPCGDLLWRFQVLRENNFKQTIGGVKIEDEEEITYEKTTTTLRRGTHHLATLQTSDGHWPAQIAGPLFFMPPLVFCVYITGHLDSVFPPEHRKEILRYIYCHQNEDGGWGLHIEGHSTMFCTALNYICMRILGEGPDGGEDNACVRARNWIRQHGGVTHIPSWGKTWLSILGVFDWLGSNPMPPEFWILPSFLPMHPAKMWCYCRLVYMPMSYLYGKRFVGPITPLILQLREELHTEPYEKINWTKTRHLCAKEDIYYPHPLIQDLIWDSLYIFTEPLLTRWPFNKLVRKRALEVTMKHIHYEDENSRYLTIGCVEKVLCMLACWVEDPNGDAFKKHIARVPDYLWISEDGMTMQSFGSQEWDAGFAVQALLATNLIEEIKPALAKGHDFIKKSQVTENPSGDFKSMHRHISKGSWTFSDQDHGWQVSDCTAEGLKCCLLLSLLPPEIVGEKMEPERLFDSVNLLLSLQSKKGGLAAWEPAGAQEWLELLNPTEFFADIVVEHEYVECTGSAIQALVLFKKLYPGHRKKEIENFIFNAVRFLEDTQTEDGSWYGNWGVCFTYGSWFALGGLAAAGKTYTNCAAIRKGVKFLLTTQREDGGWGESYLSSPKKIYVPLEGNRSNVVHTAWALMGLIHAGQSERDPTPLHRAAKLLINSQLEQGDWPQQEITGVFMKNCMLHYPMYRDIYPLWALAEYRRRVPLP

SEQ ID NO: 285 - protein, 335 aa, Heliobacillus mobilis
MERKHIEVGMTMRTIIYDGPLDKGYKAVHVALGNFDGVHLGHQKLISEMVKKARARQGTAVVATFHPHPLQVTRPQSAPKIITPPDVKAALMGRLGVDIVLMLPFDAELASLSPEEFTQKILIEDLRAQSVTVGFNYSFGRGGKGTPQLLWELGQQKGFRVKVIDAVTVSGEPVSSTLIRSSLEAGRIERAAEFLGYRPILQGIVVPGDQRGRSIGFPTANLQVAAEQFLPARGVYAAWARVGQKEAESMAVLNIGVKPTFGSGLAETIEAHLIDFEGDLYGQPLSLSLLSHLRPEMRFQSAEQLVEQIHRDVQAVRHYFHEQREHIFPHQIIEI

SEQ ID NO: 286 - protein, 466 aa, Arabidopsis thaliana
  unsure (1)..(466): unsure at all Xaa locations
MDVPRPAFKCFDDDGRLKRSGTVWTASAHIITAVIGSGVLSLAWAIGQLGWIAGPTVMXLFSFVTYYSSTLLSDCYRTGDPVSGKRNYTYMDAVRSILGGFRFKICGLIQYLNLFGITVGYTIAASISMMAIKRSNCFHESGGKNPCHMSSNPYMIMFGVTEILLSQIKDFDQIWWLSIVAAIMSFTYSAIGLALGIIQVAANGVVKGSLTGISIGAVTXTQKIWRTFQALGDIAFAYSYSVVLIEIQDTVRSPPAESKTMKIATRISIAVTTTFYMLCGCMGYAAFGDKAPGNLLTGFGFYNPFWLLDVANAAIVIHLVGAYQVFAQPIFAFIEKQAAARFPDSDLVTKEYEIRIPGFRSPYKVNVFRAVYRSGFVVLTTVISMLMPFFNDVVGILGALGFWPLTVYFPVEMYIRQRKVERWSMKWVCLQMLSCGCLMITLVAGVGSIAGVMLDLKVXKPFKTTY

SEQ ID NO: 287 - protein, 501 aa, Xylella fastidiosa 9a5c
MLLWLASVKEAFFMSERQRRTRILATLGPATDPPGVLDALFKAGVNVVRLNFSHGDASDQARRAAEVRAAAAHVGVEIGILADLPGPKIRIGRFTEGKVRLVADARFDLLADSNAPLGDATQVGVSYLGLPQDVAAGDVLLLDDGLMQLQVVQVQGARIVTTVLNDGVLSDRKGLNKQGGGLSLGALTDRDRELIGIVSRMGVDFIAVSFCRHAEEMHEARRIARECGCDAALVSKIERAEAIVNLAEIVAASDVVMVARGDLGVEIGDAQLPGLQKKIIKEALLQNKVVITATQMLQSMVESPMPTRAEVLDVANAVIDGTDAVMLSAETATGDYPVKAVEAMARICLGAEHQFEFDTDYEMAQRNLQRADHAIAMATMFLSEHICLGGVVALTESGTTPRFLSRFRSHVPIYAFTRHEDVRRRMVLMRGVFPMRFDSRGLTPREAARATIRLLVECGCMSPGDRVVFTSGEHMETLGATNTLRLLEVGADGGVSGLWEL

SEQ ID NO: 288 - protein, 423 aa, Tropheryma whipplei TW08/27
MTDDTEYRCSFCGKEHHQVDDLIAGPDVRICSECVVLSCEIVEDRRNEALAKQDAFIKRKQRSVLEGLPKPAEIYAFLDEYVIGQQKAKRDLSVAVYNHYKRLVSTKSESENEVELSKSNILLIGPTGCGKTYLAQTLARMLRVPFAVADATALTEAGYVGDDVENVLLKLLQDADFDITRAEAGIVCIDEIDKISRKADSPSITRDVSGEGVQQALLKILEGTAASVPLQGGKKHTQYEQASINTRNILFIVAGAFSGIEEIISSRIGRSNMGFGSDLLRKDTDVFDQILPEDLRKFGLIPEFIGRLPIVTAISHLDGEDMIRVLTEPKNALVKQYKRLFSLDGVSLGFDHEALEAIVELALKRKTGARALRSVMESILSPIMFDVPSRGDIESVRITAETVAGGGPHLTMRCARSNYIRSA

SEQ ID NO: 289 - protein, 477 aa, Simarouba glauca
  unsure (1)..(477): unsure at all Xaa locations
LEKKKLGHIAQIIGPVLDVAFLPGKMPNIYNALVVKGRBTVGQPINMTCEVQQLLGNNRVXAVAMXATDGLTRGMEXIDTGAPLXVPVGGATLGXIFNVLGEPVDNLGPVBTRTTSPIHKPAPAFIQLDTKLSIFETGIKVVBLLAPYRRGGKIGLFGGAGVGKTVLIMELINNIAKAHGGVSIFGGVGERTREGNDLYMEMKESGVINEQNIAESKVALVYGQMNEPPGARMRVGLTALTMAEYFRDVNEQDVLLFIDNIFRFVQAGSEVSALLGRMPSAVGYQPTLSTEMGSLQERITSTKEGSITSIQAVYVPADDLTDPAPATTFAHLDATTVLSRGLAAKGIYPAVDPLDSTSTMLQPRIVGEEHYETAQRVKQTLQRYKELQDIIAILGLDELSEEDRLTVARARKIERFLSQPFFVAEVFTGSPGKYVGLAETVRGFKLILSGELDGLPEQAFYLVGNIDEVTAKATNLE

SEQ ID NO: 290 - protein, 587 aa, Cyanidium caldarium
MTTVRVNGMKNGIIKKVSGPVVSAENMDGAAMYELVRVGNEQLVGEIIRLEGSVATIQVYEETSGLTIGDPVLCTGSPLSVELGPGLMGNIFDGIQRPLEKIAERSNSVFIPRGVNVPALDRKKVWEFRPADNLKVGDPITAGDIYGIVPETPLIDHKIMLPPNQMGKIVFLAPPGDYTLEDTVLEIDFNGQKKKFSMVHQWPVRLPRPVTEKLRADKPLLTGQRVLDALFPSVQGGTCAIPGAFGCGKTVISQALSKFSNSDGIVYVGCGERGNEMAEVLKDFPELTMTVGDREESIMKRTLLVANTSNMPVAAREASIYTGITVSEYYRDMGLNISMMADSTSRWAEALREISGRLAEMPADSGYPAYLAARLASFYERAGKVSCLGSPNRQGSITIVGAVSPPGGDFSDPVTSATLGIVQVFWGLDKKLAQRKHFPSVNWLISYSKYMKALEPYYEERFPEFLNYQQKAREILQTEDDLMEIVQLVGKDSLAENDKITLEVAKMIREDFLAQNSFTEYDRFCPFYKSVLMLRNMIHFYELANKAVEGSGEQHLTLAQIKEQMGETIYKISGMKFLDPAQGWSLF

SEQ ID NO: 291 - protein, 85 aa, Antirrhinum majus subsp. cirrhigerum
GSVSEANTQYYQQEASKLRAQISNLQNQNRNMLGESLGGLTLRDLKNLETRVEKGISRIRSKKNELLFTEIEYMQKRQEIDLHHN

SEQ ID NO: 292 - protein, 491 aa, Lilium superbum
TTSGSGVSTLEEKNLGRIAQIIGPVLDVVFPPGKMPNIYNALVVKGRDTVGPQINVTCEVQQLLGNNRVRAVAMSATDGLMRGMEVIDTGTPLSVPVGGATLGRIFNVLGEPVDNLGPVDTRTTSPIHRSAPAFIQLDTKLSIFETGIKVVDLLAPYRRGGKIGLFGGAGVGKTVLIMELINNIAKAHGGVSVFGGVGERTREGNDLYMEMKESGVINEKNIAESKVALVYGQMNEPPGARMRVGLTALTMAEYFRDVNEQDVLLFIDNIFRFVQAGSEVSALLGRMPSAVGYQPTLSTEMGSLQERITSTKEGSITSIQAVYVPADDLTDPAPAATFAHLDATTVLSRGLAAKGIYPAVDPLDSTSTMLQPRIVGEEHYEIAQRVKQTSQRYKELQDIIAILGLDELSEEDRLTVARARKIERFLSQPFFVAEVFTGSPGKYVALAETIKGFQLILSGELDGLPEQAFYLVGNIDEATAKAMNLEGESNL

SEQ ID NO: 293 - protein, 480 aa, Solanum tuberosum
MIPIMSSAPLSTPAPVTLPVRTIPGSYGLPLLGPIADRLDYFWFQKPENFFTKRMEKHKSTVFRTNVPPCFPFVGSVNPNVVAVLDVKSFSHLFDMEIVEKANVLVGDFMPSEVYTGDMRVCAYLDTSEPKHAQIKNFSLDILKRSSKTWVPTLLKELDTMFTTFEADLSKSKEASLLPALQKFLFNFFSLTLLGADPSVSPEIANSGYIFLDSWLAIQLAPTVSIGVLQPLEEILVHSFAYPFFLVKGNYEKLVQFVKNEAKEVLNRAQTEFQLTEQEAIHNLLFILGFNAFGGFTIFLPTLLGNLGDEKNAEMQEKLRKEVRDKVGVNPENLSFESVKEMELVQSFVYETLRLTPPVPSQYARARKDFKLSSHDSVYEIKKGELLCGYRPLVMKDPKVLDEPEKFVLERFTKEKGKELLNYLFWSNGPQTGRPTESNKQCSAKEIVTLTASLIVAYIFQKYDSVSFSSGSLTSVKKAS

SEQ ID NO: 294 - protein, 483 aa, Ancistrocladus korupensis
VPEVSTKNLGRIAQIIGPVLDVAFPPGKMPNIYNALVVKGRDTLGQPINVTCEVQQLLGNNRVRAVAMSATDGLMRGMEVIDTGAPLSVPVGGATLGRIFNVLGEPVDNLGPVDTRTTSPIHRSAPAFIQLDTKLSIFETGIKVVDLLAPYRRGGKIGLFGGAGVGKTVLIMELINNIAKAHGGVSVFGGVGERTREGNDLYMEMKESGVINEQNIAESKVALVYGQMNEPPGARMRVGLTALTMAEYFRDVNEQDVLLFIDNIFRFVQAGSEVSALLGRMPSAVGYQPTLSTEMGSLQERITSTKEGSITSIQAVYVPADDLTDPAPATTFAHLDATTVLSRGLAAKGIYPAVDPLDSTSTMLQPRIVGEEHYETAQRVKQTLQRYKELQDIIAILGLDELSEEDRLTVARARKIERFLSQPFFVAEVFTGSPGKYVGLAETIRGFQLILSGELDGLPEQAFYLVGNIDEASAKAMNLEMES

SEQ ID NO: 295 - protein, 268 aa, Salmonella typhimurium
MERYENLFAQLNDRREGAFVPFVTLGDPGIEQSLKIIDTLIDAGADALELGVPFSDPLADGPTIQNANLRAFAAGVTPAQCFEMLAIIREKHPTIPIGLLMYANLVFNNGIDAFYARCEQVGVDSVLVADVPVEESAPFRQAALRHNIAPIFICPPNADDDLLRQVASYGRGYTYLLSRSGVVGAENRGALPLHHLIEKLKEYHAAPALQGFGISSPEQVSAAVRAGAAGAISGSAIVKIIEKNLASPKQMLAELRSFVSAMKAASRA

SEQ ID NO: 296 - protein, 264 aa, Escherichia coli
MKKTKIVCTIGPKTESEEMLAKMLDAGMNVMRLNFSHGDYAEHGQRIQNLRNVMSKTGKTAAILLDTKGPEIRTMKLEGGNDVSLKAGQTFTFTTDKSVIGNSEMVAVTYEGFTTDLSVGNTVLVDDGLIGMEVTAIEGNKVICKVLNNGDLGENKGVNLPGVSIALPALAEKDKQDLIFGCEQGVDFVAASFIRKRSDVIEIREHLKAHGGENIHIISKIENQEGLNNFDEILEASDGIMVARGDLGVEIPVEEVIFAQKMMI

SEQ ID NO: 297 - protein, 283 aa, Oryza sativa
  unsure (1)..(283): unsure at all Xaa locations
KIPSNHIPGGAGNEKLQKLLTRHMEEQRKRKALMSCREGKAMAEXXEEAISQIVGLQDLKXQLRRWARGMLFDEKRRAMGLGIASRRAPHMAFLGNPGTGKTMVARILGKLLHMVGVLPTDKVTEVQRTDLVGEFVGHTGPKTRRKIQDAEGGILFVDEAYRLIPMQKSDDKDYGVEALEEIMSVMDNGKIVVIFAGYCEPMKRVIASNDGFCRRVTKFFYFDDFTTTELAEILHLKMNNPTESSLLYGFKLDPSCSIEVVGELIARETTEQRRKQMNGGLVX

SEQ ID NO: 298 - protein, 498 aa, Paulownia tomentosa
  unsure (1)..(498): unsure at all Xaa locations
XXXXXXXSGSGVSTLEKKNLGRIVQIIGPVLDVAFPPGKMPNIYNALVVKGRDTVGQPINVTCEVQQLLGNNRVRAVAMSATDGLMRGMEVIDTGAPLSVPVGGATLGRIFNVLGEPVDNLGPVDTRTTFPIHRSAPAFIQLDTKLSIFETGIKVVDLLAPYRRGGKIGLFGGAGVGKTVLIMELINNIAKAHGGVSVFGGVGERTREGNDLYMEMKESGVINEENIAESKVALVYGQMNEPPGARMRVGLTALTMAEYFRDVNEQDVLLFIDNIFRFVQAGSEVSALLGRMPSAVGYQPTLSTEMGSLQERITSTKEGSITSIQAVYVPADDLTDPAPATTFAHLDATTVLSRGLAAKGIYPAVDPLDSTSTMLQPRIVGEEHYETAQRVKQTLQRYKELQDIIAILGLDELSEEDRLTVARARKIERFLSQPFFVAEVFTGSPGKYVGLAETIRGFQLILSGELDGLPEQAFYLVGNIDEATAKAMNLEMESNLKK

SEQ ID NO: 299 - protein, 461 aa, Welwitschia mirabilis
QIIGPVLDVSFSPGNLPNIYNSLIVKGQIDGREISVTCEVQQLLGNNTVRAVAMSATDGLKRGMKVIDTGAPLSVPVGKATLGRIFNVLGEPVDNLGPVETDKTSPIHRSAPTFPELDTNLAIFETGIKVVDLLAPYRRGGKIGLFGGAGVGKTVLIMELINNIAKAHGGVSVFGGVGERTREGNDLYMEMKQSGVINEKNITESKVALVYGQMNEPPGARMRVGFTALAMAEYFRDVNKQDVLLFIDNIFRFVQAGSEISALLGRMPSAVGYQPTLSTEMGSLQERITSTKKGSITSVQAVYVPADDLTDPAPATTFAHLDATTVLSRGLAAKGIYPAVDPLDSTSTMLQPGIVGEEHYETAQGVKQTLQRYKELQDIITILGLDELSEEDRLTVARARKIERFLSQPFFVAEVFTGSPGKYVSLTETIRGFKMILSGDLDALPEQSFYLVGNIDEVISS

SEQ ID NO: 300 - protein, 523 aa, Oryza sativa
  unsure (1)..(523): unsure at all Xaa locations
WRAARSWRARRRWHWSCRPRRRSLRSXALRLLQLLGQQPIWVVAAADVPAGRRGCQTRCGNLDIPFPFGIGDQCAIHGGFGLDCKNDSGTYRTFIGPFEVTKISVPDAKAWMKMGISWQCYDPVTKQMNDSMVGQNFTNTPYRFSYEDNKIFVIGCNTMAYMRGVSXCLSTCSDEPTNGSCSGAGCCSXCGYLVVMEKAAFRYSTTYIPSINFWNDYNGTVPAVMDWVIRRETCEEAKRDMSSYACVSDNSDCHNSTNGXXGYLCKCSKGFDGNPYIKDGCKDINECLDNTTYPCAGLCQNTMGGYDCSCXXSRTXIRWRMSVFQIXKNQKSSWEMPVVEAELQHATNKFDKNQILGHGGHGTVYKGLLKDNTEIAVKKCMTMDEQHKKEFGKEMLILSQINHINIVKLLGCCLEVQVPMLVYEFIPNGTLCNLIHGNHGQNISPVTRLRIAHESAEALAYLHSYASPPIIHGDVKSSNILLDVNFMAKVSDFALDLIEPAGAAXCSQGRTFSTLMLLKMRKG

SEQ ID NO: 301 - protein, 480 aa, Arabidopsis thaliana
MVVQNVQDLDVLPKHSSDSFDDDGRPKRTGTVWTASAHIITAVIGSGVLSLAWAVAQIGWIGGPVAMLLFSFVTFYTSTLLCSCYRSGDSVTGKRNYTYMDAIHSNLGGIKVKVCGVVQYVNLFGTAIGYTIASAISLVAIQRTSCQQMNGPNDPCHVNGNVYMIAFGIVQIIFSQIPDFDQLWWLSIVAAVMSFAYSAIGLGLGVSKVVENKEIKGSLTGVTVGTVTLSGTVTSSQKIWRTFQSLGNIAFAYSYSMILIEIQDTVKSPPAEVNTMRKATFVSVAVTTVFYMLCGCVGYAAFGDNAPGNLLAHGGFRNPYWLLDIANLAIVIHLVGAYQVYCQPLFAFVEKEASRRFPESEFVTKEIKIQLFPGKPFNLNLFRLVWRTFFVITTTLISMLMPFFNDVVGLLGAIGFWPLTVYFPVEMYIAQKNVPRWGTKWVCLQVLSVTCLFVSVAAAAGSVIGIVSDLKVYKPFQSEF

SEQ ID NO: 302 - protein, 473 aa, Tropheryma whipplei str. Twist
MFMRRAKIVVTLGPAVSDLDSVRDLISAGADVFRMNLSHGSLDFHREVFLNVRTAAAELDRHIAIFADLQGPKIRLGRFASGPYTLQEGDIFTITTEQVLGTKELSSTTLPTLPDNVSEGDLLLIDDGKVALRAIGNDGVRITTRVEVPGKVSNNKGINLPGVGVKVPALSEKDIDSLRWALSLPVDMIALSFVRCASDVDAVHKVMDEEGIRLPVIAKIEKPQAVSAIEEIALRFDAIMVARGDLGVELPLEDVPVAQKEIVKVARRFARPVIIATQMLESMISSSRPTRAEASDVANAVLDGADALMLSGETSVGEWPVEAVRVMSRVIEKTEEKAISQIVGFGTTPKTQGGALAWAAAKVAEFIDARYLCVFSESGDSIRRVSRLRHDIPIIGFSPVGSVVRQVSLSWGVRCFLIERLHQTDQMMRKAEHVLLTNNLAEIGEKIVIISGSPVGVPGSTNHMRIHELGSTS

SEQ ID NO: 303 - protein, 270 aa, Microbulbifer degradans 2-40
MNRLKKTLSDLKAAQKKALVTYFVNGDPRPSVSLKAMHALVEGGADIIEVGVPFSDPMAEGPVIQRGHERALEHNVSLKGTLALVKEFRKANSDTPVVLMGYANPVERMGYELFAAQAKAAGVDGLLTVDLPPEEAVELNKELVANGLESIFLLAPTTTEERMKKVVGLASGFLYYVSLKGVTGAGHLDVNAVKERVEKISSLTDLPVLVGFGIKDPESAKSIGANADGVVVGSVLVDAMGNAASESDEVICEKIINIVAPIRAGLDSLA

SEQ ID NO: 304 - protein, 461 aa, Xylella fastidiosa Dixon
MPSKTDFTSSTMTPREIVQELDRHIVGQQVAKRSVAIALRNRWRRMQLPEELRNEVMPKNILMIGPTGVGKTEIARRLATLANAPFVKVEATRFTEVGYVGKDVEQIGRDLVDTAVKMYREQAKVRVRTQVEEYAEERILDALLPRRSVGIGFDVDADVIRQEPSAHDSETRAKFRRMLRSGELEDREIELDVAVNVSMDIMTPPGMEEMGQQLRQMFSNIGGGKSQKRKLTIKAARPLLIEEEAAKLVNEDEIRAAAIEACEQNGIVFIDEIDKVVKRGDTVGGGDVSVSREGVQRDLLPLVEGSNVSTKYGTIRTNHILFIASGAFHLTKPSDLIPELQGRFPIRVELDALSKADFIRILTEPKAALTKQYQELLKTEGVSLDFTEDAIDRIAEIAYLVNERQENIGARRLHTVLERLLETLSYESPDRDGESVTVDADYVNAHLGELVKDPDLSRYIL

SEQ ID NO: 305 - protein, 225 aa, Petunia x hybrida
MGRGKIEIKRIENNTNRQVTFCKRRNGLLKKAYELSVLCEAEIALIVFSTRGRVYEYSNNNIRAIIDRYKKATVETSNAFTTQELNAQFYQQESKKLRQQIQLIQNSNRHLVGEGLSSLNVRELKQLENRLERGIARIRSKKHEMILAESEDLQKREIQLEQENAFLRSKIAENERLQELSMMPAGGQEYNAIQQYLARNMLQLNMMEGVPSYPLPSDKKSLDLE

SEQ ID NO: 306 - protein, 490 aa, Sphalmium racemosum
GPGVSTLEEKNLGRIAQIIGPVLDVAFPPGKMPNIYNALVVKGRDTVGQQINVTCEVQQLLGNNRVRAVAMSATDGLMRGMEVIDTGAPLSVPVGGATLGRIFNVLGEPVDNLGPVDTRTTSPIHRSAPAFIQLDTKLSIFETGIKVVDLLAPYRRGGKIGLFGGAGVGKTVLIMELINNIAKAHGGVSVFGGVGERTREGNDLYMEMKESGVINEQNIAESKVALVYGQMNEPPGARMRVGLTALTMAEYFRDVNEQDVLLFIDNIFRFVQAGSEVSALLGRMPSAVGYQPTLSTEMGSLQERITSTKEGSITSIQAVYVPADDLTDPAPATTFAHLDATTVLSRGLAAKGIYPAVDPLDSTSTMLQPRIVGEEHYETAQRVKQTLQRYKELQDIIAILGLDELSEEDRLTVARARKIERFLSQPFFVAEVFTGSPGKYVGLAETIRGFQLILSGELDGLPEQAFYLVGNIDEATAKAMNLEVESNLKK

SEQ ID NO: 307 - protein, 94 aa, Cucumis sativus
SLVEDGEFNYQNLFDAILDTVYSALEKNGGGSLEVVVSETGWPTEGGEAATVDNARTYNNNLIQHVKQGTPKRQGRAIETYVFAMSDENEKTTP

SEQ ID NO: 308 - protein, 284 aa, Methanococcus voltae
MKNLENLEKDLKNDLKKDLKKEKPILVSFLVSGDPNIEATLKFMNALDEYCGVIELGIPFSDPIADGSTIQEANVRSLSNGYKIHQSFDVLREFRKFSDTPVVLMTYYNPIYKRGIENFVIQAKEAGANGLIIVDLPLDEAEQYRAICKKHDMGTVFLVAPNTPDERLMYSDEASTLFLYVISTFGITGARGSFEKMTFEFIARAKNLCDKNKLYVGFGISNGEHAEKIIENGADGVIVGSAFVDIIKEYGDSNETIYKLKELARELSEGIHKGYVKYNEKNKY

SEQ ID NO: 309 - protein, 239 aa, Mesotaenium caldariorum
DQFPKWNPINRETNLGRLQLRYGDALDAVDLFVSTVDPGKEPPLTTANTLLSILAMDYPVEKLNCYLSDDGASKLTFDAVNETSGFAKKWVPFCKKFAVEPRAPEAYFAQKADFLKGQVQSSFVNERRNMKKEYEEFKVRINHLVSDFQNVPEDGWTMADGSYWPGNNARDHPGMIQVFLGPSGGKDVEGNALPRLVYVSREKRPGFNHHKKAGAMNALIRVSALLTNAPHILILDCDH

SEQ ID NO: 310 - protein, 266 aa, Nicotiana glauca
MGLQSLCGSVLLGFSVSLLLFAVTFCYADDKTIQVVGIGECADCEESNIKTAHAFSGIRVTIDCKVENGEIKTRGEGKLDKDGKFMVSLPQEMMKDGKLEEDCYAQLHSASAAPCYNGIDNSKIVVIKSKNYEKHTLKPAGNLKFSTALCTSAFLWPHYKYPPLPKLPPFPKNKPFPPIYKKPLPPPIPVYKPKPPVVKPPSVPIYKPVKPLPPLVPIYKSIPPSYKKPCPPLFPKVHIHPKLPPFPKIPPKYFHRPLFPPSIPHP

SEQ ID NO: 311 - protein, 592 aa, Petunia x hybrida
MMRIAVRYCLNGNPFFSFFAYSIAPRHYSTNTCSISVKGNFGVSNEFENVKCLDDAFSLFRQMVTTKPLPSAVSFSKLLKALVHMKHYSSVVSIFREIHKLRIPVDAFALSTVVNSCCLMHRTDLGFSVLAIHFKKGIPYNEVTFTTLIRGLFAENKVKDAVHLFKKLVRENICEPDEVMYGTVMDGLCKKGHTQKAFDLLRLMEQGITKPDTCIYNIVIDAFCKDGMLDGATSLLNEMKQKNIPPDIITYTSLIDGLGKLSQWEKVRTLFLEMIHLNIYPDVCTFNSVIDGLCKEGKVEDAEEIMTYMIEKGVEPNEITYNVVMDGYCLRGQMGRARRIFDSMIDKGIEPDIISYTALINGYVEKKKMDKAMQLFREISQNGLKPSIVTCSVLLRGLFEVGRTECAKIFFDEMQAAGHIPNLYTHCTLLGGYFKNGLVEEAMSHFHKLERRREDTNIQIYTAVINGLCKNGKLDKAHATFEKLPLIGLHPDVITYTAMISGYCQEGLLDEAKDMLRKMEDNGCLPDNRTYNVIVRGFFRSSKVSEMKAFLKEIAGKSFSFEAATVELLMDIIAEDPSLLNMIPEFHRDNKK

SEQ ID NO: 312 - protein, 270 aa, Deinococcus radiodurans
MTATPETATNRGVQRLHAAFARAEAEGRAAFIPFMTGGYPDAARFGEVAGDLLARADIMEVGIPYSDPLGDGPTIQRASEQALAGGTSTRRTLELVRELRQKDDTPIVIMTYINPIYAVGPAEFMRLAQEAGVDGLILPDLPPDQDLEIADLAAQHGLAVTFLIAPTSTPERVKLVAEACTGFLYAVSVTGVTGAREGAALGEVPRMLDLARQYAQRPVVVGFGVKDAATAQQVAQVADGVVVGSAFINAVAAGRDVGALADELAAGCRR

SEQ ID NO: 313 - protein, 419 aa, Bacillus anthracis str. A2012
MFKFNDEKGQLKCSFCGKTQTQVRKLVAGPGVYICDECIELCTEIVQEELAKDEEVEFKDVPKPVEIREILDEYVIGQDNAKKALAVAVYNHYKRINSNSKIDDVELAKSNIALIGPTGSGKTLLAQTLARILNVPFAIADATSLTEAGYVGEDVENILLKLIQAADYDVEKAEKGIIYIDEIDKVARKSENPSITRDVSGEGVQQALLKILEGTVASVPPQGGRKHPHQEFIQIDTTNILFICGGAFDGIEPIIKRRLGEKVIGFGSEKKNADVNEKHVLSHVLPEDLLRFGLIPEFIGRLPVIANLEPLDEDALVDILTKPKNALVKQFQKLLELDDVELEFEEGALIEIAKKAIERKTGARGLRSIIEGLMLEVMFELPSRKDIEKCILTKETVADNAAPKLVLQDGTVLDTKTSA

SEQ ID NO: 314 - protein, 476 aa, Citrus x paradisi
  unsure (1)..(476): unsure at all Xaa locations
TSGSGVSXXXQTNLGXFAQIIGPVLXVAFPPGKMPNIYNALVVXGRDTVDQPINVTCEVQQLLGNNRVRAVAMSATDGLTRGMEVIDTGAPXSVPVGGVTLGRIFNVLGEPVDNLGPVDTRTTSPIHKSAPAFIQLDTRLSIFETGIKVVDLLAPYRRGGKIGLFGGAGVGKTVLIMELINNIAKAHGGVSVFGGVGERTREGNDLYMEMKESGVINDQNLSESKVALVYGQMNEPPGARMRVGLTALTMAEYFRDVNEQDVLLFIDNIFRFVQAGSEVSALLGRMPSAVGYQPTLSTEMGSLQERITSTKEGSITSIQAVYVPADDLTDPAPATTFAHLDATTVLSRGLAAKGIYPAVDPLDSTSTMLQPRIVGEEHYETAQRVKQTLQRYKELQDIIAILGLDELSEEDRLTVARARKIERFLSQPFFVAEVFTGSPGKYVGLAETIRGFKLILSGELDGLPEQAFYLVGNIDE

SEQ ID NO: 315 - protein, 402 aa, Klebsormidium flaccidum
LLGDNKVRAISMSATDGLMRGMKVTDTGAALSVPVGEATLGRIFNVLGGPVDNLGPVNHTKTFPIHRPAPAFTQLDTKLAIFETGIKVVDLLAPYRRGGKIGLFGGAGVGKTVLIMELINNIAKAHGGVSVFGGVGERTREGNDLYMEMKESKVINEQDISESKVALVYGQMNEPPGARMRVGLTALTMAEYFRDVNKQDVLLFIDNIFRFVQAGSEVSALLGRMPSAVGSQPTLSTEMGGLQERITSTKDGSITSIQAVYVPADDLTDPAPATTFAHLDATTVLSRGLAAKGIYPAVDPLDSTSTMLQPWIVGEEHYEIAQGVKETLQRYKELQDIIAILGLDELSEEDRLTVARARKIERFLSQPFFVAEVFTGSPGKYVSLAETIKGFQLILSGQMDSL

SEQ ID NO: 316 - protein, 455 aa, Bacillus cereus
ALVERVESEMQLSSAESGNGRMIRNIVEEGERRQSARISEDGYEYTDSTELITFKASDFLVDTRDKDFDLEKELETIVGLTDIKDFVRSLEKQLIAQQLRQSVGIRQKSSQNLNMIFTGNPGTGKTTVARVVGDLLKRMGVLKSGKLVEVDKSNLISPYAGQTPEKVREVFMSALGGVLFIDEAYALSTDNVGREAIDTLVKLVEDHRDSVIVILAGYEKEMRDFLQANSGLKSRFPNDVYFPDYSVAELVEIAKVATEKAGLVLAEESIAPLSKVLAREVKRLKADAGNGRLVRNVIEKAKRELDNRIVNEGILDGNEMVTLLPEDFEKEQNNATAEFQLEEHLQKIIGLNEVKDFMRSLQDQIRITQTRKNLGLPVDEGSALHMIFTGNPGTGKTTVARVVAELLYQLGILSSNKVIEVDRSGLVAGYVGQTAIKTKEVIQSALGGVLFIDER

SEQ ID NO: 317 - protein, 242 aa, Shigella boydii
LKKRKEGAFVPFVTLGDPGVELSLKIIDALIEAGADALELGIPFSDPLADGPTIQNATLRAFAAGVTPAQCFEMLTLIRQKHPAIPIGLLMYANLVFNKGIDEFYAQCEKVGIDSVLVADVPVEESAPFRQAALRHNVAPIFICPPNADDDLLRQIASYGRGYTYLLSRAGVTGAENRAALPLNHLVTKLKEYNAAPPLQGFGISTPEQVKAAIDAGTAGAISGSAIVKIIEHNMNQPEKML

SEQ ID NO: 318 - protein, 486 aa, Glycine max
MVEKSSRTNLGHHQDFGMEAYSIDGVSSQSESKFYDDDGHVKRTGNVWTTSSHIITAVVGSGVLSLAWAMAQMGWVAGPVVMIFFSAVTLYTTSLLADCYRCGDPVTGKRNYTFMDAVQSILGGYYDTFCGVVQYSNLYGTAVGYTIAASISMMAIKRSNCFHSSGVKNPCHVSSNPYMIGFGIIQILFSQIPDFHKTWWLSIVAAIMSFAYSTIGLALGIAKVAETGTFKGSLTGVRIGTVTEATKVWGVFQGLGDIAFAYSYSQILIEIQDTIKSPPSEAKTMKKSAKISIGVTTTFYMLCGFMGYAAFGDSAPGNLLTGFGFFNPYWLIDIANAAIVIHLVGAYQVYAQPLFAFVEKWASKRWPEVDTEYKVPIPGFSPYNLSPFRLVWRTVFVIITTIVAMLIPFFNDVLGLLGALGFWPLSVFLPVQMSIKQKRTPRWSSRWIGMQILSVVCLIVSVAAAVGSVASIVLDLQKYKPFHVDY

SEQ ID NO: 319 - protein, 263 aa, Antithamnion sp.
MNIISESLRSHPNSCALIPFITAGYPDINTTIQALYELDSQGADIIELGIPYSDALADGSVIQHSSLIALQGGTYIDQVLHILEVVSTKLNTPIIILPYYNPILKRGIEKFIKQISLMGAKGLIVPDLPLEETDELIVICNDNQIELVLFVAPTSSMKRINSISKKSPGCIYLVSSTGVTGVRDDIDIKVMELSNYIKKVSNKFIMLGFGISTPEHIKKIMKWNIDGVVVGSAFVKKLSALKIDDRISSISSLCKSLKKATIL

SEQ ID NO: 320 - protein, 478 aa, Streptomyces coelicolor A3(2)
MRRAKIVCTLGPATDSYDQIKDLVDAGMDIARFNFSHGTHAEHEERYHRVRKASDETGRSVGALADLQGPKIRLGHFGEGPVLLERGDSFTITVEEGVEGDRYICGTTYAGLAEDVTPGERVLVDDGKVCLEVTGVDGTRVRTRVIEGGMVSDHKGLNLPGVAVSVPALSKKDEDDLRWALRAGFDVVALSFVRSGRDILDVHRIMDEEGRRLPVIAKVEKPQAVENIEDIVAAFDGIMVARGDLGVEMPLEQVPTVQKRAVKLAKRNAKPVIVATQMLDSMIDNARPTRAEASDVANAVIDGTDAVMLSGETSVGKHPTDTVRTMARIVEAAEEDILAKGLPPLTERNKPRTQGGAVARAAAEMGDFLGAKFLVAFTQSGDTVRRLSRYRSPIPLLAFTPEPATRSQLSLTWGVETFLGPHADSTDAMVDQVDELLTRYGRCEKGDVVVITAGSPPGVSGTTNLVRVHHIGEDDIPK

SEQ ID NO: 321 - protein, 368 aa, Oryza sativa
  unsure (1)..(368): unsure at all Xaa locations
STRAHTHARTYIARATPRHAAVTPFQATLTRTRVAATTLSWLSRXKASSPSSPAASSSSSSAPAKLGAAPGRVAVRKLTAAATSLRLDRAPAARANGARAVPVSRTMSRLMEKGKTAFIPYITAGDPDMGTTAEALRLLDACGADVIELGVPFSDPYNDGPVIQASAARALSAGATMDGIMSMLAEVTPELSCPVVLFSYLGPIVRRGPANFTAAAKEAGVQGLIVPDLPYLEACSXXRSEVIKNNLELVLLTTPTTPPDRMKAITAASGGFVYLVSVNGVTGSRQDVNPRVEHLLQEIKQVTDKAVCVGYGISTPDHVRQIAEWGADGVIIGSAMVRQLGEAASPKQGLKRLEKYARSLKNALPXKL

SEQ ID NO: 322 - protein, 485 aa, Seddera hirsuta
TTSGSEVSAVEKKNLGRIVQIIGPVLDVAFPPGKMPNIYNALVVQGRDNEQMNVACEVQQLLGNNRVRAVAMSDTDGLMRGMEVIDTGAPISVPVGGATLGRIFNVLGEPVDNLGPVDTKTTSPIHRSAPAFIQLDTKLSIFETGIKVVDLLAPYRRGGKIGLFGGAGVGKTVLIMELINNIAKAHGGVSVFGGVGERTREGNDLYMEMKESGVINEENIAESKVALVYGQMNEPPGARMRVGLTALTMAEYFRDVNEQDVLLFIDNIFRFVQAGSEVSALLGRMPSAVGYQPTLSTEMGSLQERITSTKEGSITSIQAVYVPADDLTDPAPATTFAHLDATTVLSRGLAAKGIYPAVDPLDSTSTMLQPRIVGEEHYETAQRVKQTLQRYKELQDIIAILGLDELSEEDRLTVARARKIERFLSQPFFVAEVFTGSPGKYVGLAETIRGFQLILSGELDGLPEQAFYLVGNIDEATAKAMNLKT

SEQ ID NO: 323 - protein, 265 aa, Magnetospirillum magnetotacticum
PTWPSAVQASDYNVERSQRGIVYIDEIDKISRKSDNPSITRDVSGEGVQQALLKIMEGTVASVPPQGGRKHPQQEFLQVDTTNILFICGGAFAGLERIISQRGKGTSIGFGASVQAPDDRRTGEIFRSVEPEDLLKFGLIPEFVGRLPVLATLEDLDEEALKKILQEPKNALVKQYQRLFEMENVELTFQDEALSLVARKAIERKTGARGLRSILETILLDTMYDLPGLDSVEQVVIGPEVVEGKSRPLFIHGDRNKDAPASVSA

SEQ ID NO: 324 - protein, 498 aa, Glycine max
MALHFLLLLLFAVSVVAADEEPFIGVNIGTDLSDMPHPTQVVALLKAQQIRHVRLYDADQAMLLALAKTGIQVAVTVPNEEILAIGQSNSTAANWVSRNVVAHYPATNITAICVGSEVLTTLPNAAKVLVSAIKYIHSALVASNLDRQVKVSTPLSSSIILDSFPPSQAFFNRSLNPVLVPLLDFLQSTGSYLMLNIYPYYDYMQSNGVIPLDYALFKSLPPNKEAVDSNTLLHYTNVFDAMVDAAYFAMAFLNYTNIPVVVTESGWPSKGGSNEPDATVDNANTYNSNLIKHVFNKTGTPKHPGIDVSTYIYELYNEDMKSGPLSEKNWGLFDANGTPIYILHLTESGAVLANDTSNNTFCIAKDGADPKMLQAALDWACGPGKVECSPLLQGQPCYEPDNVIAHANYAFDTYYHKMGKTPDACDFNGVATISTSDPSHGSCLFPGSVGKNGTLGNFTAPSMNSTNSDSSAYKFSCDLRIRSLLMVTGFLLWGVVLL

SEQ ID NO: 325 - protein, 575 aa, Borrelia burgdorferi
MNTKGKVVGVNGNLVTIEVEGSVSMNEVLFVKTAGRNLKAEVIRIRGNEVDAQVFELTKGISVGDLVEFTDKLLTVELGPGLLTQVYDGLQNPLPELAIQCGFFLERGVYLRPLNKDKKWNFKKTSKVGDIVIAGDFLGFVIEGTVHHQIMIPFYKRDSYKIVEIVSDGDYSIDEQIAVIEDDSGMRHNITMSFHWPVKVPITNYKERLIPSEPMLTQTRIIDTFFPVAKGGTFCIPGPFGAGKTVLQQVTSRNADVDVVIIAACGERAGEVVETLKEFPELMDPKTGKSLMDRTCIICNTSSMPVAAREASVYTAITIGEYYRQMGLDILLLADSTSRWAQAMREMSGRLEEIPGEEAFPAYLESVIASFYERAGIVVLNNGDIGSVTVGGSVSPAGGNFEEPVTQATLKVVGAFHGLTRERSDARKFPAISPLESWSKYKGVIDQKKTEYARSFLVKGNEINQMMKVVGEEGISNDDFLIYLKSELLDSCYLQQNSFDSIDAAVSSERQNYMFDIVYNILKTNFEFSDKLQARDFINELRQNLLDMNLSSFKDHKFNKLEHALGELINFKKVI

SEQ ID NO: 326 - protein, 478 aa, Dichapetalum brownii
SWLEKKNSGRIAQIIGPVLDIAFPPGKMPNIYNALVVKGRDAFGQQINVTCEVQQLLGNNRVRAVAMSATDGLMRGMEVIDTGAPLSVPVGGATLGRIFNVLGEPVDDLGPVDTGTTSPIHRSAPAFIQLDTKLSIFETGIKVVDLLAPYRRGGKIGLFGGAGVGKTVLIMELINNIAKAHGGVSVFGGVGERTREGNDLYMEMKESGVINEENIAESKVALVYGQMNEPPGARMRVGLTALTMAEYFRDVNEQDVLLFIDNIFRFVQAGSEVSALLGRMPSAVGYQPTLSTEMGSLQERITSTKEGSITSIQAVYVPADDLTDPAPATTFAHLDATTVLSRGLAAKGIYPAVDPLDSTSTMLQPQIVGEEHYETAQRVKQTLQRYKELQDIIAILGLDELSEEDRLTVARARKIERFLSQPFFVAEVFTGSPGKYVGLAETIRGFKLILSGELDSLPEQAFYLVGNIDEATAKATTL

SEQ ID NO: 327 - protein, 499 aa, Citrus sinensis
MNASMMMINSMSVSPDMPSSSPFQSQSLSTPTSSPPSTSLPLRTIPGSYGWPLLGPISDRLDYFWFQGPETFFRKRIEKHKSTVFRTNIPPTWPLFLNVNPNVIAVLDCKSFAHLFDMEIVEKKNILVGDFMPSVKFTGGLRVSAYLDTSEPKHAQLKGFAMDTLKRSSKLWVSEVVSSLDTLFDTVEKELSEKNSISYMVPLQKCVFNFLSKSIVGADPKADAEIAENGFSMLDKWLALQILPTVSINILQPLEEIFLHSFAYPFALVSGDYNKLHNFVEKEGKEVVQRGQDEFGLTKEEAIHNLLFILGFNAFGGFSILLPKLINAIASDTTGLQAKLRSEVKEKCGTSALTFESVKSLELVQSVVYETLRLNPPVPLQFARARKDFQLSSYDSVYDIKKGELLCGYQPLVMRDSKVFDDAESFKAERFMGEKGSELLSYLYWSNGPQTGTPNDMNKQCAGKDYVTLVACLTVAYVFQRYESITGNSSSITAVEKAK

SEQ ID NO: 328 - protein, 239 aa, Antirrhinum majus
MEFPNQDSESLRKNGRGKIEIKRIENITNRQVTFCKRRNGLLKKAYELSVLCDAEVALVVFSSRGRLYEYANNSVRATIERYKKASADSSNSVSTSEANTQFYQQEANKLRRQIREIQTSNRQMLGEGVSNMALKDLKSTEAKVEKAISRIRSKKNELLFAEIEHMQKRELELHNANMFLRAKIAEGERAQQQMNLMPGSDYQPMTSQSYDVRNFLPMNLMEPNQQQYSRHDQTALQLV

SEQ ID NO: 329 - protein, 425 aa, Oceanobacillus iheyensis HTE831
MFKFNEEKGQLKCSFCGKSQEQVRKLVAGPGVYICDECIDLCTEIVEEELGTEEDMEMNEIPKPKEICDILDDYVIGQDKAKKNLSVAVYNHYKRVNSGKGNDEVEIAKSNIAMIGPTGSGKTLLAQTLARIINVPFAMADATSLTEAGYVGEDVENILLKLIQAADYDVEKAEKGIIYIDEIDKVARKSENPSITRDVSGEGVQQALLKILEGTVASVPPQGGRKHPHQEFIQIDTTNILFIVGGAFDGIDQVIKRRLGKKVIGFGSHEKQEDLDTGQLLSKVLPEDLLRYGLIPEFIGRIPVIGSLTPLDEEALIEILTKPKNALVKQYQKLFEIDHVELEFEEEALQEIAKKAIERKTGARGLRSIIEGIIVDVMFDIPSREDVDRCIITKETVSDDDGSPKLVFRDGTVKLGNEKLPKESA

SEQ ID NO: 330 - protein, 328 aa, Triticum aestivum
MADHLQVQQQHQHQLELPSGFRFHPTDEEIITSYLVPKVLNPTFTAIAIAEVDLNKNDPYELPKKAKMGEKEWYFYCQKDRKYPTGIQTNRATKAGYWKATGKDKEIFHPLPTLIGMKKTLVFYKGRAPRGEKTNWVMHEYRLEISKQPAYGPSTAIAKAAAINASSKKERVVCKIFHKNIGVKKVVTPSYAMHMPMFIGGEQQQGSLNSCTFPPPMDYGASLSLAPPLFLFEDSLYQLHAAKVGLAMTGSLVLPMVNNPHHEMMGGNPMVSYQQQQMMQMQMQMGADQCFMVGVEPGSESSSMVSREGVDRLGNNVQGNGATTTIDS

SEQ ID NO: 331 - protein, 580 aa, Hordeum vulgare
ELVRVGHDSLIGEIIRLEGDSATIQVYEETAGLTVNDPVLRTKKPLSCELGPGILGNIFDGIQRPLKTIAIKSRDVYIPRGVSVPALDKDQLWEFQPNKLGVGDNITNGDLYATVFENTLMKHHIALPPGAMGKISYIAPAGQYSLQDTVLELEFQGIKKEFTMLHTWPVRTPRPVASKLAADTPLLTGQRVLDALFPSVLGGTCAIPGAFGCGKTVISQALSKYSNSDTVVYVGCGERGNEMAEVLMDFPQLTMTLPDGREESVMKRTTLVANTSNMPVAAREASIYTGITIAEYFRDMGYNVSMMADSTSRWAEALREISGRLAEMPADSGYPAYLASRLASFYERAGKVQCLGSPDRTGSVTIVGAVSPPGGDFSDPVTSATLSIVQVFWGLDKKLAQRKHFPSVNWLISYSKYSTALEGYYEKFDPGFIDMRTKAREVLQREDDLNEIVQLVGKDALGESDKITLETAKLLREDYLAQNAFTPYDKYCPFYKSVWMMRNIIHFNQLANQAVERAANADGHKITYAVVKSRMGDLFYRLVSQKFEDPAEGEDVLVAKFQKLYDDLTAGFRNLEDEAR

SEQ ID NO: 332 - protein, 502 aa, Nicotiana tabacum
MEHSLMSTGSYFLLFSSSAFLLILLSFSVEKSHALETRETIESHFHTLQLSSLLPSSSCNPATKGKRRGASLEVVNRQGPCTLLNQKGAKAPTLTEILAHDQARVDSIQARITDQSYDLFKKKDKKSSNKKKSVKDSKANLPAQSGLPLGTGNYIVNVGLGTPKKDLSLIFDTGSDLTWTQCQPCVKSCYAQQQPIFDPSTSKTYSNISCTSAACSSLKSATGNSPGCSSSNCVYGIQYGDSSFTIGFFAKDKLTLTQNDVFDGFMFGCGQNNKGLFGKTAGLIGLGRDPLSIVQQTAQKFGKYFSYCLPTSRGSNGHLTFGNGNGVKASKAVKNGITFTPFASSQGTAYYFIDVLGISVGGKALSISPMLFQNAGTIIDSGTVITRLPSTAYGSLKSAFKQFMSKYPTAPALSLLDTCYDLSNYTSISIPKISFNFNGNANVELDPNGILITNGASQVCLAFAGNGDDDSIGIFGNIQQQTLEVVYDVAGGQLGFGYKGCS

SEQ ID NO: 333 - protein, 258 aa, Streptococcus pneumoniae R6
MPKTLTEKLNAIKATGKGIFVPYIMAGDHEKGLDGLGETIHFLEDLGVSAIEVGIPFSDPVADGPVIEEAGLRSLAHGTSTQALVETLKTIETEIPLVIMTYFNPLFQYGVENFVKDLADTAVKGLIIPDLPHEHANFVEPFLADTDIALIPLVSLTTGIERQKELIEGAEGFVYAVAINGVTGKSGNYRADLDKHLAQLHQVADIPVLTGFGVSSQADLERFNAVSDGVIVGSKIVKALHQGEPIQDFIRQAVAYQK

SEQ ID NO: 334 - protein, 395 aa, Equisetum x ferrissii
PVGEVTLGRIFNVLGEPVDNMGPVEATAKSPIHKPAPAFMDLETTVSIFETGIKVVDLLAPYRRGGKIGLFGGAGVGKTVLIMELINNIAKAHGGVSVFGGVGERTREGNDLYMEMKESKVINEENISESKVALVYGQMNEPPGARMRVGLTALTMAEYFRDVNKQDVLLFIDNIFRFVQAGSEVSALLGRMPSAVGYQPTLATEMGCLQERITSTKEGSITSIQAVYVPADDLTDPAPATTFAHLDATTVLSRGLAAKGIYPAVDPLDSTSTVLQPWIVGEEHYEVAQGVKQTLQRYKELQDIIAILGLDELSEQDRLLVARARKIERFLSQPFFVAEVFTGSPGKYVSLNETIRGFKMILTGELDSLPEQAFYLVGNIDEATAKAAILQLDNI

SEQ ID NO: 335 - protein, 420 aa, Caulobacter crescentus CB15
MTKAASGDTKSTLYCSFCGKSQHEVRKLIAGPTVFICDECVELCMDIIREEHKIAFVKSKDGVPTPREICEVLDDYVIGQGHAKKVLAVAVHNHYKRLNHASKNNDVELAKSNILLVGPTGTGKTLLAQTLARIIDVPFTMADATTLTEAGYVGEDVENIVLKLLQAADYNVERAQRGIVYIDEIDKISRKSDNPSITRDVSGEGVQQALLKIMEGTVASVPPQGGRKHPQQEFLQVDTTNILFICGGAFAGLEKIISARGAAKSIGFGAKVTDPEERRTGEILRNVEPDDLQRFGLIPEFIGRLPVVATLEDLDEAALVKILTEPKNAFVKQYQRLFEMENIGLTFTEDALHQVAKKAIARKTGARGLRSIMEGILLETMFELPTYEGVEEVVVNAEVVEGRAQPLLIYAEKKGGAASA

SEQ ID NO: 336 - protein, 418 aa, Novosphingobium aromaticivorans
MTKLSGSDTKSTLYCSFCGKSQHEVRKLIAGPTVFICDECVELCNDIIREETKAGIAGKKDGGVPTPRDIFETLNDYVIGQDRAKRVLSVAVHNHYKRLKHSGKGGDVELSKSNILLVGPTGSGKTLLAQTLAKTFDVPFTMADATTLTEAGYVGEDVENIILKLLQASDYNVEKAQHGIVYIDEIDKISRKAENPSITRDVSGEGVQQALLKLMEGTTASVPPQGGRKHPQQEFLQVDTTNILFICGGAFAGLEKIIADRLQKRSIGFGAHVADPDKRKVGELLQKAEPEDLLKFGLIPEFVGRLPVIATLNDLDIEALVKILKEPKNALVKQYAKLFELEDVTLTFTDDALEAIAKKAIERKTGARGLRSIVEGLLLDTMFDVPTESDIAEIVVDKDVVEGRKEPVRVLKGKEEAA

SEQ ID NO: 337 - protein, 409 aa, Rhodospirillum rubrum
  unsure (1)..(409): unsure at all Xaa locations
MKRNRCAKILATLGPATSSESTLETLVRAGADMVRLNFSHGAHEEHRRRYDVVRAVENKLGRPIGILMDLQGPKLRVGDFVGGKVKLETGATFRLDMEKDLGTIQRVRLPHPEIFAAIGEGTDLLLDDGKLRLRVETFGADYAITRVITGGVLSDHKGLNVPNAVLPISALTEKDRRDLQFGLDLGVDWVGLSFVQRPEDVAEARKLIGGRAAIISKIEKPAALDHLTHIIELSDALMVARGDLGVEVPPERVPILQKRILAACHLAGKPVVVATQMLESMINAPTPTRAEASDVATAIYDGADAVMLSAETAVGQYPVEAVAMMDKIIQQVETDEHYQYLRNARRESPXXXXXXXXXXXXXXXXXXPSAPPPVRWPRPSRPPPSSPIPPRDRRRCAPPASAPACRSFA

SEQ ID NO: 338 - protein, 242 aa, Shigella boydii
LKERKEGAFVPFVTLRDPGIEQSLKIIDTLIEAGADALELGIPFSDPLADGPTIQNATLRAFAAGVTPAQCFEMLALIRQKHPTIPIGLLMYANLVFNKGIDEFYAQCEKVGVDSVLVADVPVEESAPFRQAALRHNVAPIFICPPNADDDLLRQIASYGRGYTYLLSRAGVTGAENRAALPLNHLVAKLKEYNAAPPLQGFGISAPDHVKAAIDAGAAGAISGSAIVKIIEQHINEPEKML

SEQ ID NO: 339 - protein, 640 aa, Mycobacterium leprae
MLISGRSGWAILGTGGKAAVNRGDAGKLGGQSVIARAHVKVDGDVVSRFATCCRALGLAVYDRQRPADLAAARSGFTALARIAHDQCDVWIGLAAAGDVSTPVLAAISCTADTAGMLQRQVELAPAALGFHYDTGLYLQFRAIGPDDFHLAYAASLASTGGPGPYAEADQIVTGIIDRRPGWRDARWVAAVIHYRAGRWSDVVKLLTPIVNDPDIDEAYTHAAKIALGTALARLGMFAPALSYLEEPAGPVAVAAVDGALAKALVLRAHTDEESASEVLQDLYAAHPDNEQIEQALSDTSFGIVTTTAARIDARTDPWDPETEPGVEDFIDPAAHERKAVLLHEAERQLAEFIGLDEVKNQVSRLKSSVAMELVRKQRGLMVAQRAHHLVFAGPPGTGKTTIARVVAKVYCGLGLLKKENIREVHRADLIGQHIGETEAKTNAVIDSALDGVLFLDEAYALVATGAKNDFGLVAIDTLLARMENDRDRLVVIIAGYRADLDKFLDTNEGLRSRFTRNIDFPSYASHELVEIAHKMAEQRDSVFEQAALDELEVLFANLATSSTPDSNGISRRSLDIAGNGRFVRNIVERSEEEREFRLDHSNNVGTGELSDEELMTVTSEDVRRSVEPLLRGLGLMVPHD

SEQ ID NO: 340 - protein, 485 aa, Hibiscus punaluuensis
  unsure (1)..(485): unsure at all Xaa locations
STLEKXNLGRISQIIGPVLDVAFPPGKMPNIYNALVVKGRDTAGQQINVTCEVQQLLGNNRVRAVAMSATDGLTRGMEVIDTGAPLSVPVGGSTLGRIFNVLGEPVDNLGPVDTRTTSPIHKPAPAFIQLDTKLSIFETGIKVVDLLAPYRRGGKIGLFGGAGVGKTVLIMELINNIAKAHGGVSVFGGVGERTREGNDLYMEMKESGVINEQNLAESKVALVYGQMNEPPGARMRVGLTALTMAEYFRDVNEQDVLLFIDNIFRFVQAGSEVSALLGRMPSAVGYQPTLSTEMGSLQERITSTKEGSITSIQAVYVPADDLTDPAPATTFAHLDATTVLSRGLAAKGIYPAVDPLDSTSTMLQPRIVGEEHYETAQSVKQTLQRYKELQDIIAILGLDELSEEDRLTVARARKIERFLSQPFFVAEVFTGSPGKYVGLAETIRGFKLILSGELDGLPEQAFYLVGNIDEATAKATNLEMESKLK

SEQ ID NO: 341 - protein, 456 aa, Aesculus pavia
  unsure (1)..(456): unsure at all Xaa locations
IGPVLDVAFPPGEMPNIYNALVVXGRDTVGQPINVACEVQQLLGNNRVRAVAMSATDGLMRGMEVIDTGAPLSVPVGGATLGRIFNVLGEPVDNLGPVDTRTTSPIHKSAPAFIQLDTKLSIFETGIKVVDLLAPYRRGGKIGLFGGAGVGKTVLIMELINNIAKAHGGVSVFGGVGERTREGNDLYMEMKESGVINEQNLAESKVALVYGQMNEPPGARMRVGLTALTMAEYFRDVNEQDVILFIDNIFRFVQAGSEVSALLGRMPSAVGYQPTLSTEMGSLQERITSTKGGSITSIQAVYVPADDLTDPAPATTFAHLDATTVLSRGLAAKGIYPAVDPLDSTSTMLQPRIVGEEHYETAQRVKETLQRYKELQDIIAILGLDELSEEDRLTVARARKIERFLSQPFFVAEVFTGSPGKYVGLAETIRGFKLILSGELDGLPEQAFYLVGNIDE

SEQ ID NO: 342 - protein, 485 aa, Xanthoceras sorbifolium
SGPGVSELEKKNLGRVAQIIGPVLDVAFPPGKMPNIYNALVVRGRDTVGQPINVTCEVQQLLGNNRVRAVAMSATDGLTRGMEVIDTGAPLSVPVGGATLGRIFNVLGEPVDNLGPVDTRTTSPIHKSAPAFIQLDTKLSIFETGIKVVDLLAPYRRGGKIGLFGGAGVGKTVLIMELINNIAKAHGGVSVFGGVGERTREGNDLYMEMKESGVINEQNLAESKVALVYGQMNEPPGARMRVGLTALTMAEYFRDVNEQDVLLFIDNIFRFVQAGSEVSALLGRMPSAVGYQPTLSTEMGSLQERITSTKEGSITSIQAVYVPADDLTDPAPATTFAHLDATTVLSRGLAAKGIYPAVDPLDSTSTMLQPRIVGEEHYETAQRVKQTLQRYKELQDIIAILGLDELSEEDRLTVARARKIERFLSQPFFVAEVFTGSPGKYVGLAETIRGFKLILSGELDGLPEQAFYLVGNIDEVTAKATNLEM

SEQ ID NO: 343 - protein, 619 aa, Schizosaccharomyces pombe
MAGGIELAKKAIRSLKNYDEHENRYGSIFSVSGPVVVAANMLGCSMYELVRVGHEELVGEVIRIHQDKCTIQVYEETSGLTVGDPVQRTGKPLSVELGPGLAETIYDGIQRPLKQIFDKSQSIYIPRGINTESLNREHKWDFTPNKDLRIGDHVSGGDVFGSVFENSLFNDHKIMLPPRARGTVTYIAEAGSYHVDEKLLEVEFNGKKHSFSMLHTWPVRAARPVADNLTANQPLLTGQRVLDALYPCVQGGTTAIPGAFGCGKTVISQSLSKYSNSDLIVYVGCGERGNEMAEVLMDFPELTIDINGKPEPIMKRTTLVANTSNMPVAAREASIYTGITLAEYYRDQGKNVSMMADSTSRWAEALREISGRLAEMPADSGYPAYLGAKLASFYERAGRARCLGSPDREGTVSIVGAVSPPGGDFSDPVTSATLGIVQVFWGLDKKLAQRKHFPSINTSLSYSKYINALQPWYEERVPGFNTLRDQIKQIIQQEDSMLEIIQLVGKSALSETDKVTLDIAGIIKNDFLQQNGYSDYDRCCPLYKTYHMMRNMIAYYTKAKSAVETGSVPWSKIKESTSDIFYELTSMKFENPNEGEKEIVEHYETLHKKIEDKFHTLTE

SEQ ID NO: 344 - protein, 490 aa, Erycibe glomerata
MRINPSSSGSEVSVVEKKNLGRIVQIIGPVLDVAFPPGKMPNIYNALVVQGRDNEKANVTCEVQQLLGNNRVRAVAMSDTDGLMRGMEVIDTGAPISVPVGGSTLGRIFNVLGKPVDNLGPVDTNTTSPIHRPAPAFIQLDTKLSIFETGIKVVDLLAPYRRGGKIGLFGGAGVGKTVLIMELINNIAKAHGGVSVFGGVGERTREGNDLYMEMKESGVINEENIAESKVALVYGQMNEPPGARMRVGLTALTMAEYFRDVNEQDVLLFIDNIFRFVQAGSEVSALLGRMPSAVGYQPTLSTEMGSLQERITSTKEGSITSIQAVYVPADDLTDPAPATTFAHLDATTVLSRGLAAKGIYPAVDPLDSTSTMLQPRIVGEEHYETAQRVKQTLQRYKELQDIIAILGLDELSEEDRLTVARARKIERFLSQPFFVAEVFTGSPGKYVGLTETIRGFQLILSGELDGLPEQAFYLVGNIDEATAKAMNLKT

SEQ ID NO: 345 - protein, 492 aa, Erythroxylum confusum
  unsure (1)..(492): unsure at all Xaa locations
INPTTSGXGVSTLEKKXPRRIAQIIGPVLDVSFHPGKMPNIYNALVVKGRDTGGQQINVTCEVQQLLGNNRVRAVAMSATEGLMRGMEVIDTGAPLSVPVGGATLGRIFNVLGEPVDELGPVDTRTTSPIHRSAPAFIQLDTKLSIFETGIKVVDLLAPYRRGGKIGLFGGAGVGKTVLIMELINNIAKAHGGVSVFGGVGERTREGNDLYMEMKESGVINEENIAESKVALVYGQMNEPPGARMRVGLTALTMAEYFRDVNEQDVLLFIDNIFRFVQAGSEVSALLGRMPSAVGYQPTLSTEXGSLQERITSTKEGSITSIQAVYVPADDLTDPAPATTFAHLDATTVLSRGLAAKGIYPAVDPLDSTSTMLQPQIVGEEHYETAQKVKQTLQRYKELQDIIAILGLDELSEEDRLTVARARKIERFLSQPFFVAEVFTGSPGKYVGLAETIRGFKLILSGELDSLPEQSFYLVGNIDEATAKATNLEMES

SEQ ID NO: 346 - protein, 478 aa, Arabidopsis thaliana
NISAATITPLTASPPYNAGIVRLAVGWTIIGPFRFQGPDKFFRTRAEKYKSTVFRTNIPPTFPFFGNVNPNIVAVLDVKSFSHLFDMDLVDKRDVLIGDFRPSLGFYGGVRVGVYLDTTEPKHAKVRTYVALLLLRFAMETLKRSSKVWLQELRSNLNIFWGTIESEISKNGAASYIFPLQRCIFSFLCASLAGVDASVSPDIAENGWKTINTWLALQVIPTAKLGVVPQPLEEILLHTWPYPSLLIAGNYKKLYNFIDENAGDCLRLGQEEFGLTRDEAIQNLLFVLGFNAYGGFSVFLPSLIGRITGDNSGLQERIRTEVRRVCGSGSDLNFKTVNEMELVKSVVYETLRFSPPVPLQFARARKDFQISSHDAVFEVKKGELLCGYQPLVMRDANVFDEPEEFKPDRYVGETGSELLNYLYWSNGPQTGTPSASNKQCAAKDIVTLTASLLVADLFLRYDTITGDSGSIKAVVKAK

SEQ ID NO: 347 - protein, 978 aa, Brassica napus
MAMRLLKTHLLFLHLHYVISILLLSFSPCFASTDMDHLLTLKSSMVGPNGHGLHDWVRSPSPSAHCSFSGVSCDGDARVISLNVSFTPLFGTISPEIGMLDRLVNLTLAANNFSGMLPLEMKSLTSLKVLNISNNVNLNGTFPGEILTPMVDLEVLDAYNNNFTGPLPPEIPGLKKLRHLSLGGNFLTGEIPESYGDIQSLEYLGLNGAGLSGESPAFLSRLKNLKEMYVGYFNSYTGGVPPEFGELTNLEVLDMASCTLTGEIPTTLSNLKHLHTLFLHINNLTGNIPPELSGLISLKSLDLSINQLTGEIPQSFISLWNITLVNLFRNNLHGPIPEFIGDMPNLQVLQVWENNFTLELPANLGRNGNLKKLDVSDNHLTGLIPMDLCRGGKLETLVLSDNFFFGSIPEKLGRCKSLNKIRIVKNLLNGTVPAGLFTLPLVTIIELTDNFFSGELPGEMSGDLLDHIYLSNNWFTGLIPPAIGNFKNLQDLFLDRNRFSGNIPREVFELKHLTKINTSANNLTGDIPDSISRCTSLISVDLSRNRIGGDIPKDIHDVINLGTLNLSGNQLTGSIPIGIGKMTSLTTLDLSFNDLSGRVPLGGQFLVFNDTSFAGNPYLCLPRHVSCLTRPGQTSDRIHTALFSPSRIAITIIAAVTALILISVAIRQMNKKKHERSLSWKLTAFQRLDFKAEDVLECLQEENIIGKGGAGIVYRGSMPNNVDVAIKRLVGRGTGRSDHGFTAEIQTLGRIRHRHIVRLLGYVANRDTNLLLYEYMPNGSLGELLHGSKGGHLQWETRHRVAVEAAKGLCYLHHDCSPLILHRDVKSNNILLDSDFEAHVADFGLAKFLLDGAASECMSSIAGSYGYIAPEYAYTLKVDEKSDVYSFGVVLLELIAGKKPVGEFGEGVDIVRWVRNTEGEIPQPSDAATVVAIVDQRLTGYPLTSVIHVFKIAMMCVEDEATTRPTMREVVHMLTNPP

SEQ ID NO: 348 - protein, 426 aa, Xylella fastidiosa Dixon
MSEDRLSRSGDGNKILYCSFCGKSQREVRKLIAGPSVFICDECVELCNDIIREELEEKSQSARSSLPKPKEILEVLDQYVIGQQRAKRTLAVAVYNHYKRIESRHKNDDIELAKSNILLVGPTGSGKTLLAETLARLLNVPFTIADATTLTEAGYVGEDVENIIQKLLQKCDYDVEKAQHGIVYIDEIDKISRKSENPSITRDVSGEGVQQALLKLIEGTVASVPPQGGRKHPQQEFLQVDTKNILFICGGAFAGLDKVIQQRCTEAGGIGFGVKVKSSESKRDVGKVLAGVEPEDLIKFGLIPEFVGRLPVVATLDELDESALVKILTEPKNAITKQFKKLFEMENVELEFRQDALSAVARKALKRKTGARGLRTIVELVLLDTMYELPSQEGISKVVVDESVIENKSEPYLIYQTMPAKVASGE

SEQ ID NO: 349 - protein, 487 aa, Hildebrandtia valo
NPTTSGSEVSAVEKKNLGRIVQIIGPVLDVAFPPGKMPNIYNALVVQGRDNEQMNVACEVQQLLGNNRVRAVAMSDTDGLMRGMEVIDTGAPISVPVGGATLGRIFNVLGEPVDNLGPVDTKTTSPIHRSAPAFIQLDTKLSIFETGIKVVDLLAPYRRGGKIGLFGGAGVGKTVLIMELINNIAKAHGGVSVFGGVGERTREGNDLYMEMKESGVINEENIAESKVALVYGQMNEPPGARMRVGLTALTMAEYFRDVNEQDVLLFIDNIFRFVQAGSEVSALLGRMPSAVGYQPTLSTEMGSLQERITSTKEGSITSIQAVYVPADDLTDPAPATTFAHLDATTVLSRGLAAKGIYPAVDPLDSTSTMLQPRIVGEEHYETAQRVKQTLQRYKELQDIIAILGLDELSEEDRLTVARARKIERFLSQPFFVAEVFTGSPGKYVGLAETIRGFQLILSGELDGLPEQAFYLVGNIDEATAKAMNLKT

SEQ ID NO: 350 - protein, 350 aa, Camellia sinensis
QIKVSTPLSSSIILDSFPPSQAFFNRSLNPVMVPLLSFLQSSGSSLMLNIYPYYDYMQSNGVIPLDYALFRPLPSNKEAVDANTLLHYSNVFDAMVDAAYFAMAYLNFTNIPVIVTESGWPSKGDSSEPDANLDNANTYNSNLIKHVLNKTGTPKHPGISVSTYIYELYNEDMKPGPLSEKNWGLFDANGAPIYILHLTGSGSVLANDTANQTYCTAKDGADAKMLQAALDWACGPGKVNCSALLQGQPCYEPDTVAAHATYAFDTYYQQMGKASGTCDFNGVATITTTNPTHGSCVFPGSNGKNGTFLNSTAPSLNSTSSGCPARYMRGSASASAIVAVGILSWSLVFL

SEQ ID NO: 351 - protein, 841 aa, Arabidopsis thaliana
MELDDLDLSGSWPLDQITFASNFKSPVIFSSSEQPFSPLWSFSETSGDVGGELYSAAVAPTRFTDYSVLLASSESETTTKENNQVPSPSWGIMPLENPDSYCAIKAKMTQALRYFKESTGQQHVLAQVWAPVKNRGRYVLTTSGQPFVLGPNSNGLNQYRMVSLTYMFSLDGERDGELGLPGRVFRKKLPEWTPNVQYYSSKEFSRLGHALHYNVQGTLALPVFEPSRQLCVGVVELIMTSPKINYAPEVEKVCKALEAVNLKTSEILNHETTQICNEGRQNALAEILEILTVVCETYKLPLAQTWVPCRYRSVLAFGGGFKKSCSSFDGSCMGKVCMSTSDLAVYVVDAHVWGFRDACAEHHLQKGQGVAGRAFQSGNLCFCRDVTRFCKTDYPLVHYARMFKLTSCFAVCLKSTYTGDDEYVLEFFLPPAITDKSEQDCLLGSLLQTMKQHYSSLKVVSETELCENNMSLEVVEASEDGMVYSKLEPIRIHHPAQISKDYLELNAPEQKVSLNSDFMENNEVDDGVERFQTLDPIPEAKTVKKSERKRGKTEKTISLEVLQQYFAGSLKDAAKSLGVCPTTMKRICRQHGISRWPSRKINKVNRSLTRLKHVIDSVQGADGSLNLTSLSPRPWPHQIPPIDIQLAKNCPPTSTSPLSNLQDVKIENRDAEDSAGSSTSRASCKVNPICETRFRLPTHNQEPSRQVALDDSDSSSKNMTNFWAHLTCQDTASPTILQHKLVSIKATYREDIIRFKISPESVSITELKQQVAKRLKLETAAFELKYLDDDREWVSVSCDADLSECLDTSAAKANTLRLSVHDVTFNFGSSCESSEETMMCL

SEQ ID NO: 352 - protein, 485 aa, Adansonia rubrostipa
  unsure (1)..(485): unsure at all Xaa locations
SGVSTLEKEXLGRISQIIGPVLDVAFPPGKMPNIYNALVVKGRDTAGQQINVTCEVQQLLGNNRVRAVAMSATDGLTRGMEVIDTGAPLSVPVGGATLGRIFNVLGEPVDNLGPVDTRTTSPIHKPAPAFIQLDTKLSIFETGIKVVDLLAPYRRGGKIGLFGGAGVGKTVLIMELINNIAKAHGGVSVFGGVGERTREGNDLYMEMKESGVINEQNLAESKVALVYGQMNEPPGARMRVGLTALTMAEYFRDVNEQDVLLFIDNIFRFVQAGSEVSALLGRMPSAVGYQPTLSTEMGSLQERITSTKEGSITSIQAVYVPADDLTDPAPATTFAHLDATTVLSRGLAAKGIYPAVDPLDSTSTMLQPRIVGEEHYETAQRVKQTLQRYKELQDIIAILGLDELSEEDRLTVARARKIERFLSQPFFVAEVFTGSPGKYVGLAETIRGFKLILSGELDGLPEQAFYLVGNIDEATAKATNLEMES

SEQ ID NO: 353 - protein, 310 aa, Glycine max
MLCVKPVECGVGTDGDRGCMQDNNQESGATLPGYGGCRSLAEKHGEKRVAEDDDDVREDNKTLGEWVPSLVPKTGGGGYFLHSNPIEVKESSGEDEISHIDKVTIASDQGRLMSSGSQFTEGDRPFLQCSEEKPSLPSSFRTCDLNLIEASEVHENHVDHSTVPIDIDLTMSHASVSGKFNTHATNGKEIEVIDLENDDSIQEEKSINSMDRKTETMFPGLEGFSNHAQNAADMHDVQDGYGLMISELLGPDFPNCTSVPGDINSVHNEMSLHGGTGTLAEDDSIYMSLGELSFLRPWEQPPSQDYQKHF

SEQ ID NO: 354 - protein, 410 aa, Arabidopsis thaliana
MYVVTPPQRSGFGSDCDLRVYQTWKGSNIFCLQGRFIFGPDVRSLGLTISLIVAPVTIFCIFVASKLMDDFSDSWGVSIILVAVVFTIYDLILLMLTSGRDPGIIPRNSHPPEPEVVDGNTGSGTSQTPRLPRVKEVEVNGKVFKVKYCDTCMLYRPPRCSHCSICNNCVERFDHHCPWVGQCIAQRNYRFFFMFVFSTTLLCVYVFAFCCVYIKKIKESEDISILKAMLKTPASIALILYTFISTFFVGGLTCFHLYLISTNQTTYENFRYSYDRHSNPHNKGVVDNFKEIFFSPIPPSKNNFRAMVPRENPMPSRSVVGGFMSPNMGKANDDIEMGRKGVWAMAEHGDGKDGNNNERFHVNDNELNELSPDMGNIVNGDEQINRPNNHPRNANWEMSPEVMALSARRA

SEQ ID NO: 355 - protein, 490 aa, Euplassa inaequalis
GPGVSALEEKNLGRIAQIIGPVLDVAFPPGKMPNIYNALIVKGRDTVGQQINVTCEVQQLLGNNRVRAVAMSATDGLMRGMEVIDTGAPLSVPVGGATLGRIFNVLGEPVDNLGPVDTRTTSPIHRSAPAFIQLDTKLSIFETGIKVVDLLAPYRRGGKIGLFGGAGVGKTVLIMELINNIAKAHGGVSVFGGVGERTREGNDLYMEMKESEVINKQNIAESKVALVYGQMNEPPGARMRVGLTALTMAEYFRDVNEQDVLLFIDNIFRFVQAGSEVSALLGRMPSAVGYQPTLSTEMGSLQERITSTKEGSITSIQAVYVPADDLTDPAPATTFAHLDATTVLSRGLAAKGIYPAVDPLDSTSTMLQPRIVGEEHYETAQRVKQTLQRYKELQDIIAILGLDELSEEDRLTVARARKIERFLSQPFFVAEVFTGSPGKYVGLAETIRGFQLILSGELDGLPEQAFYLVGNIDEATAKAMNLEVESNLKK

SEQ ID NO: 356 - protein, 481 aa, Carpenteria californica
  unsure (1)..(481): unsure at all Xaa locations
DSTLEKKNPGRIAQIIGPVLDVAFPSGKMPNIYNALVVKGQDTAGQPINVACEVQQLLGNNRVRAVAMSATDGLMRGMEVIDTGAPLSVPVGGATLGRIFNVLGEPVDNLGPVDTRTTSPIHRSAPAFIQLDTKLSIFETGIKVVDLLAPYRRGGKIGLFGGAGVGKTVLIMELINNIAKAHGGVSVFGGVGERTREGNDLYMEMKESGVINEQNIAESKVALVYGQMNEPPGARMRVGLTALTMAEYFRDVNEQDVLLFIDNIFRFVQAGSEVSALLGRMPSAVGYQPTLSTEMGSLQERITSTKEGSITSIQAVYVPADDLTDPAPATTFAHLDATTVLSRGLAAKGIYPAVDPLDSTSTMLQPRIVGEEHYETAQRVKETLQRYKELQDIIAILGLDELSEEDRLTVARARKIERFLSQPFFVAEVFTGSPGKYVGLAETIRGFQLILSGELDGLPEQAFYLVGNIDEATAKAMNLXM

SEQ ID NO: 357 - protein, 476 aa, Drosophyllum lusitanicum
GVSTLEKKNLGRIAQIIGPVLDVAFPPGKMPNIYNALVVKGRDTVGQPINVTCEVQQLLGNNRVRTVAMSATDGLMRGMEVIDTGVPLSVPVGGATLGRIFNVLGEPIDNLGPVDTSTTSPIHRSAPAFIQLDTKLSIFETGIKVVDLLAPYRRGGKIGLFGGAGVGKTVLIMELINNIAKAHGGVSVFGGVGERTREGNDLYMEMKESGVINEQNIAESKVALVYGQMNEPPGARMRVGLTALTMAEYFRDVNEQDVLLFIDNIFRFVQAGSEVSALLGRMPSAVGYQPTLSTEMGSLQERITSTKEGSITSIQAVYVPADDLTDPAPATTFAHLDATTVLSRGLAAKGIYPAVDPLDSTSTMLQPRIVGEEHYETAQRVKETLQRYKELQDIIAILGLDELSEEDRLTVARARKIERFLSQPFFVAEVFTGSPGKYVGLAETIRGFQLILSGELDGLPEQAFYLVGNIDEATAK

SEQ ID NO: 358 - protein, 483 aa, Durio zibethinus
  unsure (1)..(483): unsure at all Xaa locations
STLEKXNLGRISQIIGPVLDVAFPPGKMPNIYNALVVKGRDTIGQQINVSCEVQQLLGNXRVRAVAMSATDGLMRGMEVINTGAPLSVPVGGATLGRIFNVLGEPVDNLGPVDTRTTSPIHKPAPAFIQLDTKLSIFETGIKVVDLLAPYRRGGKIGLFGGAGVGKTVLIMELINNIAKAHGGVSVFGGVGERTREGNDLYMEMKESGVINEQNLAESKVALVYGQMNEPPGARMRVGLTALTMAEYFRDVNKQNVLLFIDNIFRFVQAGSEVSALLGRMPSAVGYQPTLSTEMGSLQERITSTKEGSITSIQAVYVPADDLTDPAPATTFAHLDATTVLSRGLAAKGIYPAVDPLDSTSTMLQPRIVGKEHYETAQRVKQTLQRYKELQDIIAILGLDEVSEEDRLTVARARKIERFLSQPFFVAEVFTGSPGKYVGLAETIRGFQLILSGELDGLPEQAFYLVGNIDEATAKATNLEMESK

SEQ ID NO: 359 - protein, 494 aa, Caesia contorta
MRINPTTSGPAVSTLEEKNLGRIAQIIGPVLDVVFPPGKMPNIYNALVVKGRDTTGQQINVTCEVQQLLGNNRVRAVAMSATDGLTRRMEVIDTGAPLSVPVGGATLGRIFNVLGDPVDNLGPVDTRTTSPIHRSAPAFIQLETKLAIFETGIKVVDLLAPYRRGGKIGLFGGAGVGKTVLIMELINNIAKAHGGVSVFGGVGERTREGNDLYMEMKESGVINQKNIAESKVALVYGQMNEPPGARMRVGLTALTMAEYFRDVNEQDVLLFIDNIFRFVQAGSEVSALLGRMPSAVGYQPTLSTEMGSLQERITSTKEGSITSIQAVYVPADDLTDPAPATTFAHLDATTVLSRGLAAKGIYPAVDPLDSTSTMLQPRIVGEEHYETAQRVKQTLQRYKELQDIIAILGLDELSEEDRLTVARARKIERFLSQPFFVAEVFTGSPGKYVGLGETISGFQMILSGELDGLPEQAFYLVGNIDEAIAKAMKLETES

SEQ ID NO: 360 - protein, 485 aa, Glycine max
  unsure (1)..(485): unsure at all Xaa locations
MNSRSQDQRSRPAKPATIHGCALSGDLVGLQRLLRDNPSLLNERNPVMAQTPLHVSAGHNRTEIVKFLLDWQGTDKVEMEAKNMYGETPLHMAAKNGCNEAAQLLLACGATVEARANNGMTPLHLAVWYSLRAEEFLTVKTLLEYNADCSAKDDEGMTPLNHLSQGPGTEKLRELLLWHLEEQRKQRAIEACSETKAKMDELEKELSNIVGLNDLKVQLRKWAKGMLLDEKRRSLGLHVGRRRPPHMAFLGNPGTGKTMVARILGKLLHMVGILPTDKVTEVQRTDLVGEFVGHTGPKTRRKSNMPXIKEAEGGILFVDEAYRLIPMQKSDDKDYGLEALEEIMSVMDSGKIVVIFAGYCEPMKRVIASNEGFCRRVTKFFQFNDFNSEELAQILHIKMNNLAEDSLLYGFMLHPDCCIKALAALIERETTEKQRKETNGGLVDTMLVNARENLDLRLSFDCMDTEELLTITLVDLEAGLQQLTQ

SEQ ID NO: 361 - protein, 435 aa, Agrobacterium tumefaciens str. C58 (Cereon)
MTTFSPREIVSELDRHIIGQHDAKRAVAIALRNRWRRQQLDESLRDEVMPKNILMIGPTGVGKTEISRRLAKLAGAPFIKVEATKFTEVGYVGRDVEQIIRDLVEIGIGLVREKKRAEVQAKAHQSAEERVLDALVGSTASPGTRESFRKKLRDGELDDKEIDIEVADSGSGMPGFEIPGMPGANIGVLNLSEMFGKAMGGRTKKVRTTVSKSYTDLVRDESDKLLDNEMIQREAVKSVENDGIVFLDEIDKIAARDGGMGAGVSREGVQRDLLPLVEGTTVSTKYGPVKTDHVLFIASGAFHVAKPSDLLPELQGRLPIRVELKPLTKEDFRRILTETEASLIRQYKALMATEELDLDFTDDAIDALADVAVHLNSSVENIGARRLQTVMERVLDEISFNAPDRGGSAVKIDQEYVKKHVGDLAADTDLSRYIL

SEQ ID NO: 362 - protein, 421 aa, Lactobacillus plantarum WCFS1
MFENTETNGPVNCSFCGKSQDQVKKIVAGPGVYICNECIDLCKEIIDEEFSEEQTHELTDIPTPKEIVDELDQYVIGQNEAKRTLSVAVYNHYKRVKAMADNDEETEDGPELQKSNISLVGPTGSGKTFLAQSLARILDVPFAIADATTLTEAGYVGEDVENILLKLLQNADYDVERAEKGIIYIDEIDKIAKKSENVSITRDVSGEGVQQALLKILEGTIANVPPQGGRKHPQQEFIQIDTTNILFIVGGAFDGIEDIVKRRLGDKTIGFGTDTDGKNAVLDDSKSLMQQVVPEDLLQFGLIPEFIGRLPILTALERLTEDDLVRILTEPKNALVKQYQRLIALDGAELDFNDDALRAIAQEALARNTGARGLRSIIEDTMRDIMYDIPSREDVKKVIITRETVADHAEPELVLADQKAS

SEQ ID NO: 363 - protein, 142 aa, Cicer arietinum
FDEILQEADGIILSRGNLGIDLPPEKVFLFQKSALYKCNMAGKPAVLTRVVDSMTDNLRPTRAEATDVANAVLDGSDAILLGAETLRGLYPVETISTVGRICSEAEKVFNQDLYFKKTVKYVGEPMTHLESIASSAVRAAIK

SEQ ID NO: 364 - protein, 374 aa, Glycine max
  unsure (1)..(374): unsure at all Xaa locations
MASSDPISSRHYTYNRKQKSLGLLCTNFLSLYNRDTVHLIGLDDAATRLGVERRRIYDIVNVLESIGVLSRKAKNQYTWRGFAAIPLTLQDLKEEGLKENSNSLRGPGNHDKVSDDEDDEETQSNPAATGSQSDKLNPNSTLPKPLKNENRREKSLALLTQNFVKLFVCSNVELISLERGCKIATWRRLYDIGNVQSSXTLVEKTQSVDIHKPEFRWLGMRNFINPKETTLEKRRLELISKESRKRAFGSDITNISFERNKVELFTSGDLNPNPKKPRMENGSGLGEADENNLKQGTKQASKTYEFGPFAPACVPKVGASENNNLKQVHDWGSLATAHSPQYQNEALRELFSHYMEAWKLWYSEIARKRPLQIL

SEQ ID NO: 365 - protein, 250 aa, Rosa rugosa
MAYENKPNTVLDSDAQRRLGRGKIEIKRIENTTNRQVTFCKRRNGLLKKAYELSVLCDAEVALIVFSNRGRLYEYSNNSVRETIERYKKACADSSNNGSVSEATTQYYQQEAAKLRAQITTLQNSNRGYMAEGLSNMSIKELKGVETKLEKAISRIRSKKNELLFAEIEYMQKRELDLHNNNQLLRAKGQIAENERHQQSINAIAGGHGSYDIMQPTQPFHEARNYFQVNALQPNIHQYSRHDQISLQLV

SEQ ID NO: 366 - protein, 926 aa, Oryza sativa
  unsure (1)..(926): unsure at all Xaa locations
DAEKLCFAFVLYCVSKLKETKAGSSGVRLWEILKGCKLKYDDFFKESQRLASRIDQVLGSRYGSDWEARLEVGSRQANLPTISQYPRFYCKAFNELFLSPSTDQEPGSTTNIPDYIRFGWLLFLILRSKSPELFKDLVSCIHGLVAILAILLIHVPAKFRSFTIEGSSHLIKQTEKGVDLLPSLCHNYHTSEDRLKEMMGKSYKVIEVFFSRKAINASEFKTVNLDKIDTDGLMYFKDLVDDEIFQSNLEKLEKLSSTTGCQGELDLEMFLTSNDYVLNAENSSGSSANFGCSKRVFETLASPTKTIKNMLAAPSSPSSPANGGSIKIVQMTPVTSAMTTAKWLRDVISSLPDKRSSKLEEFLSSCDMDLTSDVVKRVSIILEAIFPTKSXXDRGTSIGLNCANAFDIPWAEARKMEASKLYYRVLEAICRAESQNNNVNHLTPLLSNERFHRCLIACSAELVLATHKTVIMMFPAVLESTGLTAFDLSKIIENFVRHEETLPRELKRHLNSLEEQLLESMSWEKGSSLYNSLVVARPSLSTEINSLGLLAEPMPSLDGIVARQSIHPDGLPPTPSKRRPSAGPDGNCYPQSPKRLCTESRNSLVEHNSQTPPPKQSQTGLSILKAKYHPLQATFASPTVSNPVSGNEKCAVVGVQIFFSKILKLAAIRIRNLCERLRHEELTVSVYNIFKQILDQQTALFFNRHVDQIILCCLYGVAKVSQLSLTFKEIVNNYKREPQCKPEVFRSIFVGSTNRNGGCGSRLVDIIVFYNQVFVPTVKPLLVALMPSSTRPEDKRNTNSQIPGSTKSSPFSNLPDMSPKKVSSSHNVYVSPLRQTKMDALLSPSSRSFYACIGESTQAFQSPSKDLAAINSRLNYPTRRINTRINFDMVSDSVVAGSLGQPNGGSASSDPAAAFSPLSKKSKTDS

SEQ ID NO: 367 - protein, 373 aa, Stellaria media
  unsure (1)..(373): unsure at all Xaa locations
VDNLGPVDTRTTSPIHRSAPAFTQLDTKLSIFETGIKVVDLLAPYRRGGKIGLFGGAGVGKTVLIMELINNIAKAHGGVSVFGGVGERTREGNDLYMEMKESGVINEQNIAESKVALVYGQMNEPPGARMRVGLTALTMAEYFRDVNXQDVLLFIDNIFRFVQAGSEVSALLGRMPSAVGYQPTLSTEMGSLQERITSTKEGSITSIQAVYVPADDLTDPAPATTFAHLDATTVLSRGLAAKGIYPAVDPLDSTSTMLQPRIVGEEHYEIAQRVKQTLQRYKELQDIIAILGLDELSEEDRLTVARARKIERFLSQPFFVAEVFTGSPGKYVGLAETIRGFQLILSGELDGLPEQAFYLVGNIDEATAKAMNL

SEQ ID NO: 368 - protein, 483 aa, Borago officinalis
  unsure (1)..(483): unsure at all Xaa locations
SSGGSTLEKKNLGRIVQIIGPVLDVAFRLGKMPNIYNALVVKGRDTVGQPINVTCEVQQLLGNNRVRAVAMSATDGLTRGMEVIDTGAPLSVPVGGATLGRIFNVLGEPVDNLGPVDTRTTSPIHRSAPAFIQLDTKLSIFETGIKVVDLLAPYRRGGKIGLFGGAGVGKTVLIMELINNIAKAHGGVSVFGGVGERTREGNDLYMEMKESGVINEENIAESKVALVYGQMNEPPGARMRVGLTALTMAEYFRDVNEQDVLLFIDNIFRFVQAGSEVSALLGRMPSAVGYQPTLSTEMGTLQERITSTKSGSITSIQAVYVPADDLTDPAPATTFAHLDATTVLSRGLAAKGIYPAVDPLDSTSTMLQPRIVGEEHYETAQRVKQTLQRYKELQDIIAILGLDELSEEDRLTVARARKIERFLSQPFFVAEVFTGSPGKYVGLAETIRGFQLILSGELDGLPEQAFYLVGNIDEATAXAMNLE

SEQ ID NO: 369 - protein, 207 aa, Triticum aestivum
MWRLKVSEGGGPWLRSVNNFLGRAVWEFDPDYGTPEERAEVKRVRREFTDRRFEKKESQDLLMRMQYAKEKHLQVDLPAIKLADSAQVTEETLLTSLRRCLSQHSALQAHDGHWAGDFSGILFIMPILIFALHVTGSLNTVLSTEHRHEICRYIYNHQNEDGGWGTQVLGPSTMFGSCLNYVTLRLLGEVENDALTKGHAWILLRGS

SEQ ID NO: 370 - protein, 578 aa, Oryza sativa
  unsure (1)..(578): unsure at all Xaa locations
SQDSTITMTICSCEETINEFEMLTRDAARVQKDTLKKILEINASAEYLQNFGLGGRTDXXESYKSCIPLCVHNDIEPYIQRIVDGDTSPVVTGEPITNLSLSSGTTHGKPKFIPFNDELLETTLQIYRTSYAFRNREYPIGQGKALQFVYGSKQVITKGGILATTATTNLYRRQRYKEGMKDIQSQCCSPDEVIFGPDFHQSLYCHLLCGLIYSEEVHSVFSTFAHSLVHAFQTFEEVWEDLCTDIRDGVLSKKVTAPSIREAVSKILKPNPELADSIYKKCIGLSNWYGVIPALWPNAKYVYGIMTGSMEPYLKKLRHYAGNLPLISADYGASEGWVGSNIDPTVPPEQVTYAVLPQVGYFEFIPLXETNRGESDPVGLTEVEVGKIYEVVITNFAGLYRYRLGDVVKIARFHNSTPELQFICRRSLVLSINIDKNTEKDLQLAVEEASKFLEGEKLEVMDFTSFVERSSDPGRYVIFWELSGDASDEVLSSCANALDLAFIDAGYTGSRKIKTIGPLELRILRKGTFKEILDHFLSLGGAVSQFKTPRFVNPSNSKVLQILSRNVTQSYFSTAYGF

SEQ ID NO: 371 - protein, 617 aa, Saccharomyces sp. DH1-1A
MAGAIENARKEIKRISLEDHAESEYGSIYSVSGPVVIAENMIGCAMYELVKVGHDNLVGEVIRIDGDKATIQVYEETAGLTVGDPVLRTGKPLSVELGPGLMETIYDGIQRPLKAIREESQSIYIPRGIDTPALSRTIKWQFTPAKFRVGDHISGGDIYGSVFENSLISSHKIILPPRSRGTITWIAPAGEYTLDEKILEVEFDGRKSDFNLYHTWPVRVPRPVTEKLSADYPLLTGQRVLDALFPCVQGGTTCIPGAFGCGKTVISQSLSKYSNSDAIIYVGCGERGNEMAEVLMEFPELYTEMSGTKEPIMKRTTLVANTSNMPVAAREASIYTGITLAEYFRDQGKDVSMIADSSSRWAEALREISGRLGEMPADQGFPAYLGAKLASFYERAGKAVALGSPDRIGSVSIVAAVSPAGGDFSDPVTTATLGITQVFWGLDKKLAQRKHFPSINTSVSYSKYTNVLNKFYDSNYPEFPVLRDRMKEILSNAEELEQVVQLVGKSALSDSDKITLDVATLIKEDFLQQNGYSSYDAFCPIWKTYDMMRAFISYHDEAQKAAANGANWSKLADSTGDVKHAVSSSKFFEPSRGEKEVHGEFEKLLSTMQERFAESTD

SEQ ID NO: 372 - protein, 242 aa, Escherichia coli
LKERKEGAFVPFVTLGDPGIEQSLKIIDTLIKAGADALELGIPFSDPLADGPTIQNATLRAFAAGVTPAQCFEMLALIRQKHPTIPIGLLMYANLVFNKGIDEFYAQCEKVGVDSVLVADVPVEESAPFRQAALRHNVAPIFICPPNADDDLLRQIASYGRGYTYLLSRAGVTGAENRAALPLNHLVAKLKEYNAAPPLQGFGISAPDQVKAAIDAGAAGAISGSAIVKIIEQHINEPEKML

SEQ ID NO: 373 - protein, 485 aa, Androstachys johnsonii
SGPGVSALEKKNRGRIVQIIGPVLDVVFPRGKMPNIYNALVVKGRDTTGQQINVTCEVQQLLGNNRVRTVAMSATDGLMRGMEVIDTGAPLSVPVGGATLGRIFNVLGEPVDDLGPVDTRTTSPIHRSAPAFIELDTKLKIFETGIKVVDLLAPYRRGGKIGLFGGAGVGKTVLIMELINNIAKNHGGVSVFGGVGERTREGNDLYKEMKESGVINEENIAESKVALVYGQMNEPPGARMRVGLTALTMAEYFRDVNKQDVLLFIDNIFRFVQAGSEVSALLGRMPSAVGYQPTLSTEMGSLQERITSTKKGSITSIQAVYVPADDLTDPAPATTFAHLDATTVLSRKLAAKGIYPAVDPLDSTSTMLQPNIVGDDHYEIAQKVKQTLQRYKELQDIIAILGLDELSEEDRLNVARARKIERFLSQPFFVAEVFTSSPGKYVGLAETIRGFQLILSGELDSLPEQAFYLVGNIDEATAKATNLEV

SEQ ID NO: 374 - protein, 376 aa, Carteria cerasiformis
VAMQPTEGLMRGMEVLDTGNPLTVPVGKVTLGRIFNVLGEPVDNMGPVETQETLPIHRTAPAFVDLDTRLSIFETGIKVVDLLAPYRRGGKIGLFGGAGVGKTVLIMELINNIAKAHGGVSVFAGVGERTREGNDLYTEMKESGVIVEKNLSESKVALVYGQMNEPPGARMRVALTALTMAEYFRDINKQDVLFFIDNIFRFVQAGAEVSALLGRMPSAVGYQPTLATEMGSLQERITSTKDGSITSIQAVYVPADDLTDPAPATTFSHLDATTVLSRGLAAKGIYPAVDPLDSTSTMLQPWIVGEKHYDSAQKVKQTLQRYKELQDIIAILGLDELSEEDRLLVARARKIERFLSQPFFVAEVFTGSPGKYVSLQ

SEQ ID NO: 375 - protein, 468 aa, Oryza sativa (japonica cultivar-group)
MRVTIEILTSGIRATLSCRLNISCSTPFQCLPAILEGPGGVWCDVDVVEFSYYGAPAQTPKEQMFSELVDKLCGSDECIGSGSQVASHETFGTLGAIVKRRTGNKQVGFLTNHHVAVDLDYPNQKMFHPLPPNLGPGVYLGAVERATSFITDDVWYGIYAGTNPETFVRADGAFIPFADDFDISTVTTVVRGVGDIGDVKVIDLQCPLNSLIGRQVCKVGRSSGHTTGTVMAYALEYNDEKGICFFTDILVVGENRQTFDLEGDSGSLIILTSQDGEKPRPIGIIWGGTANRGRLKLTSDHGPENWTSGVDLGRLLDRLELDIIITNESLQEFAYYKDAVQQQRFALVAAVTSAVGESSGVPVAIPEEKIEEIFEPLGIQIQQLPRHDVAASGTEGEEASNTVVNVEEHQFISNFVGMSPVRDDQDAPRSITNLNNPSEEELAMSLHLGDREPKRLRSDSGSSLDLEK

SEQ ID NO: 376 - protein, 476 aa, Lycopersicon esculentum
MNSAPLSTPAPVTLPVRSIPGSYGLPLVGPIADRLDYFWFQKPENFFTKRMEKHKSTVFRTNVPPCFPFFGSVNPNVVAVLDVKSFSHLFDMEIVEKANVLVGDFMPSVVYTGDMRVCAYLDTSEPKHAQIKNFSQDILKRGSKTWVPTLLKELDTMFTTFEADLSKSNTASLLPALQKFLFNFFSLTILGADPSVSPEIANSGYIFLDSWLAIQLAPTVSIGVLQPLEEILVHSFAYPFFLVKGNYEKLVQFVKNEAKEVLSRAQTGFQLTEQEAIHNLLFILGFNAFGGFSIFLPTLLGNLGDEKNADMQEKLRKEVRDKVGVNPENLSFESVKEMELVQSFVYETLRLSPPVPSQYARARKDFKLSSHDSVYEIKKGELLCGYQPLVMKDPKVFDEPEKFVLERFTKEKGKELLNYLFWSNGPQTGRPTESNKQCAAKDMVTLTASLIVAYIFQKYDSVSFSSGSLTSVKKAS

SEQ ID NO: 377 - protein, 91 aa, Kluyveromyces dobzhanskii
ISQSLSKYSNSDTIIYVGCGERGNEMAEVLMEFPELFTEISGRKEPIMKRTTLVANTSNMPVAAREASIYTGITLAEYFRDQGKDVSMIAD

SEQ ID NO: 378 - protein, 481 aa, Buchnera aphidicola str. Sg (Schizaphis graminum)
MLNRVRRTKIVATLGPSTDKANNLEKIILSGANVLRLNFSHGSSEEHKKRAKKAKEIMFKLNCHIALLGDLQGPKIRISKFKKNSIFLKVNDVFILDANLNEKNGNNERVGIDYKKLPNDLNVNDILLLDDGRIQLKVIKIEKCAIFTKVIIGGILSNNKGINKLGGGLSADALTEKDKKDIILASEIDVDYLAVSFPRCADDLIKARELLKKSGSNAQIIAKIERAEAVFDQNAIENIILSSDAIMIARGDLGVEIGDAELVGIQKKLIRTARKLNKVAITATQMMESMILNPLPTRAEVMDVANAVLDGSDAVMLSAETASGKYPSETVISMAKVCKGAEKVPSINVSRHRLNVEFQSIEEAIAMSSMYAANHLKGITAIITMTESGKTALMTSRITSGLPIFALSKHKKTLNLTALYRGVIPIYFDSDKDGVEAANEAIILLCKKKFLFNNDLVIVTQGDIMGKIGKTNTSRILRVTY

SEQ ID NO: 379 - protein, 340 aa, Glycine max
  unsure (1)..(340): unsure at all Xaa locations
MRPIFCGNFEYDARQSELERLFRRYGKVDRVDMKSGFAFIYMEDERDAEAAIRALDRVEFGRKGRRLRVEWTKHERGVRKPASSRRSSANGRPSKTLFVINFDTYHTRTRDLERHFEPYGKIVSVRIRRNFAFVQYESEDDASRALEATNMSKLLDRVISVEFAVKDDDDRRNGYSPERGRDRHRDRSRDGRRSPSPYRRERGSPDYGRGPSPYQRERGSPDYGRDRDRSRSRSPXRRERASPAYGRRSLSPHRREREGSEPVRDSSRSPYHKERGRTDHGISPSQSPEGRGKKSPQNGHGSSRSPHDTGKTSPENGLGSGSPDEKGNPSPYNGYGGEPK

SEQ ID NO: 380 - protein, 1209 aa, Chlamydomonas reinhardtii
MSTTHPPERGLVALIKGLTIGNVPALQPDVLELYAELKGAYEAQERAAPREYAGDQDEDVKQACKQASLLFVARVLSAAQKKEKDGSETQPSNLGLSISRIVAVAGINLLDFFREVHVVVSELSAYFESRGSSSKQFSQQALLKENSETVVVMGLLAKKYKDNFNTFLHQLDFYKQVVLRLGWSAFLVLRVKLLSAFPDVVSCVELLPCIFAILASHAPRLPDCLTHITREDRGKFLLKSMADTCKADYGRVQARMPSVEALLTQVFTSAVPEWRTAVAEAKAKALSDASGPAAVGGVDLVASPVLEGLVTDTDRMNRVVAALEREYEQHYSRGATELDEREFLSTDFTKFASPRFSPGHMHSTMAKLRSGSMPLRSGGPLGPGLHTATPAHPGPQQLHLVPLGLHSPLPMMHLNAGPGVPGTPISEAMGASAWLRGVTSNMVAEPSPTLQRFLAALPINSNSSGPTPVQQLMKRVRDLVASVIPDEAAPSLLGPFPLLNTSLGVERRIEATKLYCHSLDTILQNEQRTNGLPAALALLGSAKFQRGLIACCIEVVAACYRMVSCAFPNVLDALRIKAFDMANIIGTFVKSIATLPRELKRHLFLIEEKILECLAWEPGSSLYHLIVNVHTENEAAAAAAAAAMQEAAATAACSAASGDDSQHDGAGSRAGLSSSSGGAGAAAAAEGGAGGGTEQPGASSSHNTEQSGGAPPMETAEGGAPGAATSAPPSTTSAAPAEPAPPAAASPAAPAASHAPPPSPKRSQGVAFSGMMSPAKKARGTDGGAHSTQSYIESLPNAVGFPPAAGAAQGQAGLLFEFLRKVLKLTSFRLALLCENFDFSPLEGPEVNSKVYEAIEHALYKQTHLFYNRHIDQIMLSTLYGYCKVHKLSQVSFREIIAQYRKQPQAQQSIFRSVVIDQVLPTLQIQSRADIIGFYNAVFVPAMRNFLLKSESNGSGASGPGLGGDSKHAAAGNSGNAVGAAAGAAPAQGVGATSAMPPGLPPLPPRASQSPRGPKLPLLGAIAAAPRMLGRSATGNARGGGERELGMPLLHPLLPTGSSTGGGALSPTKGSEGSGHPTPTGPVPVSRSSNGGRGGSGGRGGGRGSAEHKIPEGLAALLQALDSQKAAEENTAEEEEEEEEVDADEEQPQARVTRSGRTARDRSTGRERRGRHTEARDDMDEASMDAEFSQQTVVTGRRQRTPNRRYGAD

SEQ ID NO: 381 - protein, 379 aa, Hieracium piloselloides
MTFAFASFRMQNHKLTKMALVFLSFFFLVASSRAAISNRIGINYGRLGNNLPSPAKSIELLESMNAGRVKLYDADHEILHLLSGKDIEVAITVANDEISAIAANQHLADQWVYEHVLAHYPNTKIRFILVGNEVFSSTNNVQDMQIARDLVPAMRRIKNTIKAQGIRNIKVGTPLAMDMMETTFPPSNGSFKPDIRELMIPLLKYLNGTRSFVLVDVYPYFRVVRQVARNNSDTGIDLGFALLRTSNMTYTDPQSGLVYTDLLDQMLDSVVYAMAKLGYDDIMLALAETGWPHDGDVDEIGANRENAAEYNNNLIKKMAAVPSNGTPARPGQIVPTFIFSMYDENQKYGPATERHWGLMNPDGSAVYAVNITGKVNPSD

SEQ ID NO: 382 - protein, 591 aa, Petunia x hybrida
MMRISVRYCLNGNPFFSFFAYSIAPRHYSTNTCSISVKGNFGVSNEFQNVKCLDDAFSLFRQMVRTKPLPSVASFSKLLKAMVHMKHYSSVVSLFREIHKLRIPVHEFILSIVVNSCCLMHRTDLGFSVLAIHFKKGIPYNEVTFTTLIRGLFAENKVKDAVHLFKKLVRENICEPNEVMYGTVMNGLCKKGHTQKAFDLLRLMEQGSTKPNTRTYTIVIDAFCKDGMLDGATSLLNEMKQKSIPPDIFTYSTLIDALCKLSQWENVRTLFLEMIHLNIYPNVCTFNSVIDGLCKEGKVEDAEEIMRYMIEKGVDPDVITYNMIIDGYGLRGQVDRAREIFDSMINKSIEPDIISYNILINGYARQKKIDEAMQVCREISQKGLKPSIVTCNVLLHGLFELGRTKSAQNFFDEMLSAGHIPDLYTHCTLLGGYFKNGLVEEAMSHFHKLERRREDTNIQIYTAVIDGLCKNGKLDKAHATFEKLPLIGLHPDVITYTAMISGYCQEGLLDEAKDMLRKMEDNGCLADNRTYNVIVRGFLRSNKVSEMKAFLEEIAGKSFSFEAATVELLMDIIAEDPSITRKMHWIKLHIA

SEQ ID NO: 383 - protein, 464 aa, Bacillus halodurans
MKNVLTPRQIVERLDQYIVGQEGAKRSVAIALRNRYRRFQLEDKLRDEITPKNILMIGPTGVGKTEIARRLAKLVGAPFVKVEATKFTEVGYVGRDVESMIRDLVETSVRLVKEEKMKGVKKQAEEQANQRIVELLVPAKKKTQAYKNPLEMLFGQQQENTDHQETSAEQDTLTERRRRMSHQLALGELEDHYVTVEVEEQTPQFFDMLQGSGMEQMGMNMQEMLGNMMPKKRKKRKLTVREARRVLTEEEAQKLIDMDEVTQEAVSKAEQLGIVFIDEIDKIAGKGQQSADVSREGVQRDILPIVEGSTVVTKYGPVSTDHMLFIGAGAFHVAKPSDLIPELQGRFPIRVELSNLTVDDFVRILVEPDNALLKQYAALLETEGIKIVFTDEAVHKIATIATEVNQETENIGARRLHTLLERLLEDLSFEAPDVNLEEIVITPEYVTEKLAAIAKNRDLSQYIL

SEQ ID NO: 384 - protein, 331 aa, Cicer arietinum
MSIILMLVGVLLSSTAFEFTGAQSVGVCYGANGNNLPTKQAVVDLYKSKGIGKIRLYNPDEGALQALKDSNIEVILGVSNDALNSLTNAQSATDWVNKYVKAYSPNVKIKYISVGNEIHPDSPEANSVLPALQNIQNAISSANLGQIKVSTAIDTTLIGKSYPPNDGVFSDAASGYIKPIVNFLVSNGSPLLANVYPYFSYVNNQQSIGLDYALFTKQGNNEVGYQNLFDAILDSIYAALEKVGGSNVKIVVSESGWPSQGGTGASVGNAQTYYGNLIKHAKGGTPKRPNGPIETYLFAMFDENLKTDPETERYFGLFNPDKSPKYQLNFN

SEQ ID NO: 385 - protein, 326 aa, Oryza sativa (japonica cultivar-group)
MAFTTMKASPMSASSSSAPVLRRCVAQPARVAAARRLAAAAASVALEASPVPAAAAAAVERRMSVSQTMSKLKEKGKTAFIPYITAGDPDMGTTAEALRLLDACGADVIELGVPFSDPYADGPVIQASASRALAAGATPEAVLSMLKEVTPELSCPVVLLSYLGPILRRGAANFTAAAKEAGVQGLIVPDLPYVDTCTFRSEAIKSNLELVLLTTPATPGERMKIITEASGGFVYLVSVNGVTGPRPKVNTRVEHLLQDIKLVTDKAVCVGFGISTPDHVRQIAGWGADGVIIGSAMVRQLGEAASPKQGLKRLEEYARRMKDALP

SEQ ID NO: 386 - protein, 483 aa, Quisqualis indica
  unsure (1)..(483): unsure at all Xaa locations
XSXLEKKNLGRIAQIIGPVLDVAFPPGKMPNIYNALVVKGRDTLGQXINVTCEVQQLLGNNRVRAVAMSATDGLMRGIEVIDTGAPLSVPVGGATLGRIFNVLGEPIDDLGPVDTRTTSPIHRSAPAFIQLDTKLSIFETGIKVVDLLAPYRRGGKIGLFGGAGVGKTVLIMELINNIAKAHGGVSVFGGVGERTREGNDLYMEMKESGVINEQNIAESKVALVYGQMNEPPGARMRVGLTALTMAEYFRDVNEQDVLLFIDNIFRFVQAGSEVSALLGRMPSAVGYQPTLSTEMGSLQERITSTKEGSITSIQAVYVPADDLTDPAPATTFAHLDATTVLSRGLAAKGIYPAVDPLDSTSTMLQPRIVGEEHYETAQRVKQTLQRYKELQDIIAILGLDELSEEDRLTVARARKIERFLSQPFFVAEVFTGSPGKYVGLAETIRGFKLILSGELDSLPEQAFYLVGNIDEATAKATNLEMES

SEQ ID NO: 387 - protein, 344 aa, Lycopersicon esculentum
MASKLSNFNFFTLILYGVLTLVTPDFTGAQTGVCYGRLGNGLPSPADVVSLCNRNNIRRMRIYEPDQLTLQALRGSNIEVMLGVPNTDLENVGASQDNANTWIQNNVKNYDNVKFRYIAVGNEVSPFNENSKYVPVLFNAVRNIQTAISGAGLGDQIKVSTAIETGLTTDTSPPSNGRFKDEVLRFIEPIINFLVTNRAPLLVNLYPYFAVVDNPVIKLEYALFTSPEVVVNDNGRGYKNLFDAILDATYSALEKAGGSSLQIVVSESGWPSAGAGQLTSIDNARTYNNNLIQHVKGGSPKRPSGPIETYIFVLFDEDQKNPEIEKHFGLYSANMQPKYQISFN

SEQ ID NO: 388 - protein, 353 aa, Triticum aestivum
  unsure (1)..(353): unsure at all Xaa locations
HRADGVAVPGRRDRAGLRGGFAAPRRPVRVSVAGCFHIMPXGHRNPLRHRPALGDQLVGGDVIHDEITVNKGPPVSPLNERMVMVGAVKWVDDVIPDAPYAITEDFMNKLFTGYNIDYIIHGDDPCLLPDGTDAYALAKNAGRYKQIKRTEGVSTTDIVGRMVLXCVRERPVSDNQSHSSLQRQFXSHGHGQNIDDSGFGNGTKISHFLPTSRRIVQFSNGRGPGPDSRVVYIDGAFDLFHAGHVEILRLARGLGDFLLVGIHTDQTISSTRGPHRPIMNLHERSLSVLACRSVDEVIIGAPWHISKDMITTFNISLVVHGTIAXNMDYTEDDSNPYAAPIAMGIYHKLDCPL

SEQ ID NO: 389 - protein, 479 aa, Lycopersicon esculentum
IPIMNPAPLSTPAPVTLPVRSIPGSYGLPLVGPIADRLDYFWFQKPENFFTKRMEKHKSTVFRTNVPPCFPFFGSVNPNVVAVLDVKSFSHLFDMEIVEKANVLVGDFMPSVVYTGDMRVCAYLDTSEPKHAQIKNFSQDILKRGSKTWVPTLLKELDTMFTTFEADLSKSNTASLLPALQKFLFNFFSLTILGADPSVSPEIANSGYIFLDSWLAIQLAPTVSIGVLQPLEEILVHSFAYPFFLVKGNYEKLVQFVKNEAKEVLSRAQTEFQLTEQEAIHNLWFILGFNAFGGFSIFLPTLLGNLGDEKNADMQEKLRKEVRDKVGVNPENLSFESVKEMELVQSFVYETLRLSPPVPSQYARARKDFKLSSHDSVYEIKKGELLRGYQPLVMKDPKVFDEPEKFVLERFTKEKGKELLNYLFWSNGPQTGRPTESNKQCAAKDMVTLTASLIVAYIFQKYDSVSFSSGSLTSVKKAS

SEQ ID NO: 390 - protein, 402 aa, Nitella opaca
LLGDNKVRAVAMSATDGLMRGMEVIDTGIPLSVPVGETTLGRIFNVLGEPVDNLGPVDTTITFPIHRPAPAFTQLDTKLSIFETGIKVVDLLAPYRRGGKIGLFGGAGVGKTVLIMELINNIAKAHGGVSVFGGVGERTREGNDLYMEMKESKVINEENISESKVALVYGQMNEPPGARMRVGLTALTMAEYFRDVNKQDVLLFIDNIFRFVQAGSEVSALLGRMPSAVGYQPTLSTEMGTLQERITSTKEGSITSIQAVYVPADDLTDPAPATTFAHLDATTVLSRNLAAKGIYPAVDPLDSTSTMLQPWIVGEEHYETAQGVKETLQRYKELQDIIAILGLDELSEEDRLIVARARKIERFLSQPFFVAEVFTGSPGKYVSLIDTIKGFQMILSGELDHL

SEQ ID NO: 391 - protein, 426 aa, Mycobacterium tuberculosis CDC1551
MARIGDGGDLLKCSFCGKSQKQVKKLIAGPGVYICDECIDLCNEIIEEELADADDVKLDELPKPAEIREFLEGYVIGQDTAKRTLAVAVYNHYKRIQAGEKGRDSRCEPVELTKSNILMLGPTGCGKTYLAQTLATMLNVPFAIADATALTEAGYVGEDVENILLKLIQAADYDVKRAETGIIYIDEVDKIARKSENPSITRDVSGEGVQQALLKILEGTQASVPPQGGRKHPHQEFIQIDTTNVLFIVAGAFAGLEKIIYERVGKRGLGFGAEVRSKAEIDTTDHFADVMPEDLIKFGLIPEFIGRLPVVASVTNLDKESLVKILSEPKNALVKQYIRLFEMDGVELEFTDDALEAIADQAIHRGTGARGLRAIMEEVLLPVMYDIPSRDDVAKVVVTKETVQDNVLPTIVPRKPSRSERRDKSA

SEQ ID NO: 392 - protein, 384 aa, Glycine max
MSDLPPENPNLPLTSSSSSLHHSYSRKQKSLGLLCTNFLALYNRHGIETIGLDDAASKLGVERRRIYDIVNVLESVGVLTKRAKNQYTWKGFSAIPAALKELQEEGAKDTFHRFYTNENVKVSDDEDDEEESSSQPLSSSQTDTSKPGSLDSSKIDNRREKSLGLLTQNFIKLFVCSEARIISLDEAAKLLLGDAHNTSIMRTKVRRLYDIANVLSSMNLIEKTHTLDSRKPAFKWLGYNGEPTFTLSSDLMQAESTKRVFGTDLTNVSVKRSRTHENATERRIKMKQHAIADSSYNQSSDDAHESRRYKFGLFAPAAGGTYPAARLEDNSKRAFDVENLVSDYRPTYQNQVLKDLFAHYMDAWKSWYSEVTQKNPLPDTSKRH

SEQ ID NO: 393 - protein, 476 aa, Arabidopsis thaliana
MVQNHQTVLAVDMPQTGGSKYLDDDGKNKRTGSVWTASAHIITAVIGSGVLSLAWATAQLGWLAGPVVMLLFSAVTYFTSSLLAACYRSGDPISGKRNYTYMDAVRSNLGGVKVTLCGIVQYLNIFGVAIGYTIASAISMMAIKRSNCFHKSGGKDPCHMNSNPYMIAFGLVQILFSQIPDFDQLWWLSILAAVMSFTYSSAGLALGIAQVVVNGKVKGSLTGISIGAVTETQKIWRTFQALGDIAFAYSYSIILIEIQDTVKSPPSEEKTMKKATLVSVSVTTMFYMLCGCMGYAAFGDLSPGNLLTGFGFYNPYWLLDIANAAIVIHLIGAYQVYCQPLFAFIEKQASIQFPDSEFIAKDIKIPIPGFKPLRLNVFRLIWRTVFVIITTVISMLLPFFNDVVGLLGALGFWPLTVYFPVEMYIAQKKIPRWSTRWVCLQVFSLGCLVVSIAAAAGSIAGVLLDLKSYKPFRSEY

SEQ ID NO: 394 - protein, 513 aa, Glycine max
MLPRSRTLPSRIHQGIIEERHNVRHYLQVEVRPNNTQTETEAMNIQSNYSKCFDDDGRLKRTGTFWMATAHIITAVIGSGVLSLAWAVAQLGWVAGPIVMFLFAVVNLYTSNLLTQCYRTGDSVSGHRNYTYMEAVNSILGGKKVKLCGLTQYINLFGVAIGYTIAASVSMMAIKRSNCYHSSHGKDPCHMSSNGYMITFGIAEVIFSQIPDFDQVWWLSIVAAIMSFTYSSVGLSLGVAKVAENKSFKGSLMGISIGTVTQAGTVTSTQKIWRSLQALGAMAFAYSFSIILIEIQDTIKSPPAEHKTMRKATTLSIAVTTVFYLLCGCMGYAAFGDNAPGNLLTGFGFYNPYWLLDIANLAIVIHLVGAYQVFSQPLFAFVEKWSARKWPKSNFVTAEYDIPIPCFGVYQLNFFRLVWRTIFVLLTTLIAMLMPFFNDVVGILGAFGFWPLTVYFPIDMYISQKKIGRWTSRWLGLQLLSASCLIISLLAAVGSMAGVVLDLKTYKPFKTSY

SEQ ID NO: 395 - protein, 458 aa, Desulfitobacterium hafniense
MEQLTPRETVRELDRYIVGQNQAKRAVAIALRNRYRRSLLPEGMQEEVLPKNILMIGPTGVGKTEIARRLAKLVRAPFLKVEATKFTEVGYVGRDVESIVRDLVEISLRMVKAEKMEEVEIQAAQAAEKRLEALLVPGKRQENNSSNPFQFLFNQGQEKEETVTPEIERDRTFIRERLHRGELDEQVIEVEVEDNQPLLPDFLGTGMEINTNLQDMMAGMLPKKRHKRKVTVREARRILTTEEAQKLIDHDEAVQEAIRRVEQEGMVFLDEIDKIAGRDGASGPDVSRGGVQRDILPIVEGSTINTKYGPVKTDHILFIAAGAFHVAKPSDLIPELQGRFPIRVELESLSIEDFQRILTEPQSSLIKQYSALLETEGIKVEFTENAIDELAKVAYEVNSNTENIGARRLHTIVERVLEELSFEASELPEDYTVTINREYIQHRLGNIVRNQDLSRYIL

SEQ ID NO: 396 - protein, 215 aa, Clostridium acetobutylicum
MIKAVIFDMDGVLIDSEPLHLDYAFKLFKELNITMTPNEYSKFIGTTSLYMWSNIKDTYNLENTVESLINKERNGFFEFLSSPNTNIKPIDHIPELLGALKENNFKTAVASSSPMRVIKYIINNFELAKQFNELVTGDYVERSKPNPDIFLYAAKKLDVSPEQCVVIEDSHNGVLAAKNAGMKCIGFKNPNSGNQDLSKADTIIHSFNEIDILNL

SEQ ID NO: 397 - protein, 402 aa, Coleochaete sp. 18a1
ILGDNKVRAVSMSATDGLMRGMDVIDTGAPLSVPVGEATLGRIFNVLGEPVDQLGPVDSTITFPIHRSAPAFTQLDTKLSIFETGIKVVDLLAPYRRGGKIGLFGGAGVGKTVLIMELINNIAKAHGGVSVFGGVGERTREGNDLYMEMKESKVINEENISESKVALVYGQMNEPPGARMRVGLTALTMAEYFRDVNKQDVLLFIDNIFRFVQAGSEVSALLGRMPSAVGYQPTLSTEMGTLQERITSTKEGSITSIQAVYVPADDLTDPAPATTFAHLDATTVLSRGLAAKGIYPAVDPLDSTSTMLQPWIVGQEHYETAQGVKQTLQRYKELQDIIAILGLDELSEEDRLTVARARKIERFLSQPFFVAEVFTGSPGKYVSLIETIKGFQLILSGDLDPL

SEQ ID NO: 398 - protein, 421 aa, Rhodobacter sphaeroides
MANNTGSDSKNTLYCSFCGKSQHEVRKLIAGPTVFICDECVELCMDIIREETKSTGLKSADGVPTPREICKVLDDYVIGQMHAKRVLSVAVHNHYKRLNHSSKTDIELSKSNILLIGPTGCGKTLLAQTLARILDVPFTMADATTLTEAGYVGEDVENIILKLLQASEYNVERVQRGIVYIDEVDKITRKSDNPSITRDVSGEGVQQALLKIMEGTVASVPPQGGRKHPQQEFLQVDTTNILFICGGAFAGLEKIIAQRGKGSGIGFGAEVKDPDARGVGELFKELEPEDLPKFGLIPEFVGRLPVIATLTDLDEAALVTILTEPKNALVKQYQRLFEIEGVKLTFTADALTAIAKRAIKRKTGARGLRSIMEDILLDTMFELPGLEGVEEVVVNEEAVNSGAKPLLIYTEVTKKKDATAS

SEQ ID NO: 399 - protein, 593 aa, Enterococcus hirae
MQIGKIIKVSGPLVMAENMSEASIQDMCLVGDLGVIGEIIEMRQDVASIQVYEETSGIGPGEPVRSTGEALSVELGPGIISQMFDGIQRPLDTFMEVTQSNFLGRGVQLPALDHEKQWWFEATIEEGTEVSAGDIIGYVDETKIIQHKIMVPNGIKGTVQKIESGSFTIDDPICVIETEQGLKELTMMQKWPVRRGRPIKQKLNPDVPMITGQRVIDTFFPVTKGGAAAVPGPFGAGKTVVQHQIAKWSDVDLVVYVGCGERGNEMTDVVNEFPELIDPNTGESLMERTVLIANTSNMPVAAREASIYTGITIAEYFRDMGYDVAIMADSTSRWAEALREMSGRLEEMPGDEGYPAYLGSRLAEYYERSGRVIALGSDQREGSITAISAVSPSGGDISEPVTQNTLRVVKVFWGLDSSLAQKRHFPSINWIQSYSLYSTEVGRYMDQILQQDWSDMVTEGMRILQEEEQLNEIVRLVGIDSLSDNDRLTLEVAKSIREDYLQQNAFDDVDTFTSREKQFNMLKVILTFGKEARKALSLGAYFNEIMEGTVAVRERISRSKYIPEEELAKISSINEEIKETIQLIVSEGGMTDD

SEQ ID NO: 400 - protein, 471 aa, Tropheryma whipplei TW08/27
MRRAKIVVTLGPAVSDLDSVRDLISAGADVFRMNLSHGSLDFHREVFLNVRTAAAELDRHIAIFADLQGPKIRLGRFASGPYTLQEGDIFTITTEQVLGTKELSSTTLPTLPDNVSEGDLLLIDDGKVALRAIGNDGVRITTRVEVPGKVSNNKGINLPGVGVKVPALSEKDIDSLRWALSLPVDMIALSFVRCASDVDAVHKVMDEEGIRLPVIAKIEKPQAVSAIEEIALRFDAIMVARGDLGVELPLEDVPVAQKEIVKVARRFARPVIIATQMLESMISSSRPTRAEASDVANAVLDGADALMLSGETSVGEWPVEAVRVMSRVIEKTEEKAISQIVGFGTTPKTQGGALAWAAAKVAEFIDARYLCVFSESGDSIRRVSRLRHDIPIIGFSPVESVVRQVSLSWGVRCFLIERLHQTDQMMRKAEHVLLTNNLAEIGEKIVIISGSPVGVPGSTNHMRIHELGSTS

SEQ ID NO: 401 - protein, 485 aa, Emmenanthe penduliflora
  unsure (1)..(485): unsure at all Xaa locations
GVSTLEKKNLGRIVQIIGPVLDVAFPPGKMPNIYNALVVKGRDTAGQPINVTCEVQQLLGNNRVRAVAMSATDGLTRGMEVIDTGAPLSVPVGGATLGRIFNVLGEPVDNLGPVDTRTTSPIHRSAPAFIQLDTKLSIFETGIKVVDLLAPYRRGGKIGLFGGAGVGKTVLIMELINNIAKAHGGVSVFGGVGERTREGNDLYMEMKESGVINEENIAESKVALVYGQMNEPPGARMRVGLTALTMAEYFRDVNEQDVLLFIDNIFRFVQAGSEVSALLGRMPSAVGYQPTLSTEMGSLQERITSTKAGSITSIQAVYVPADDLTDPAPATTFAHLDATTVLSRGLAAKGIYPAVDPLDSTSTMLQPRIVGEEHYETAQRVKETLQRYKELQDIIAILGLDELSEEDRLTVARARKIERFLSQPFFVAEVFTGSPGKYVGLAETIRGFQLILSGELDGLPEQAFYLVGNIDEATAKAMNLXMESN

SEQ ID NO: 402 - protein, 382 aa, Pseudomonas fluorescens PfO-1
MTPDKKVKILATLGPAVDGIEDIRELVEAGVNIFRLNFSHGDHADHAKRYQWIREVERQLNYPLGILMDLQGPKLRVGKFADGKVQLHRGQAFRLDLDATPGDERRVNLPHPEIIAALEAGMDLLLDDGKLRLRVVTKYSDAIDTTVLNGGELSDRKGVNVPQAVLDLSPLTTKDRRDLSFGLELGVDWVALSFVQRPQDILEARELIGDKAFLMAKIEKPSAVEQLREIAELSDAIMVARGDLGVEVPAESVPQIQKNIITTCRHLGKPVVVATQMLESMRFSPAPTRAEVTDVANAVAEGADAVMLSAETASGEYPLEAVQMMSKIIRQVENGPDYQTQLDVSRPKAEATVSDAISCAIRRISNVLPVAVLVNYSESGAS

SEQ ID NO: 403 - protein, 488 aa, Rulingia sp. Chase 2196
  unsure (1)..(488): unsure at all Xaa locations
SGVSTLEKEXLGRISQIIGPVLDVAFPPGKMPNIYNALVVKGRDTVGQQINVTCEVQQLLGNNRVRAVAMSATDGLMRGMEVIDTGAPLSVPVGGATLGRIFNVLGEPVDNLGPVDTRTTSPIHKPAPAFIQLDTKLSIFETGIKVVDLLAPYRRGGKIGLFGGAGVGKTVLIMELINNIAKAHGGVSVFGGVGERTREGNDLYMEMKESGVINEQNLAESKVALVYGQMNEPPGARMRVGLTALTMAEYFRDVNEQDVLLFIDNIFRFVQAGSEVSALLGRMPSAVGYQPTLSTEMGTLQGRITSTKEGSITSIQAVYVPADDLTDPAPATTFAHLDATTVLSRGLAAKGIYPAVDPLDSTSTMLQPRIVGEEHYETAQRVKQTLQRYKELQDIIAILGLDELSEEDRLTVARARKIERFLSQPFFVAEVFTGSPGKYVGLAETIRGFKLILSGELDGLPEQAFYLVGNIDEATAKATNLEMESKLK

SEQ ID NO: 404 - protein, 222 aa, Picea mariana
MGRGKIEIKRIENTTNRQVTFCKRRNGLLKKAYELSVLCDAEVALIVFSSRGRLYEFANHSVKRTIERYKKTCVDNNHGGAISESNSQYWQQEAGKLRQQIEILQNANRHLMGDGLTALNIKELKQLEVRLEKGIGRVRSKKNEMLLEEIDIMQRREHILIQENEILRSKIAECQNSHNTNMLSAPEYDALPAFDSRNFLHANLIDAAHHYAHQEQTTLQLG

SEQ ID NO: 405 - protein, 461 aa, Pyrobaculum aerophilum str. IM2
MSAPRGDHAILRARNLTKRVATLGPSTDVLRPDELIKFLDLVDGVRINLAHASPNEVKFRIEAVRSYEKAKNRPLAVIVDLKGPSIRVGSTSPINVQEGEVVKFKLSDKSDGTYIPVPNKAFFSAVEQNDVILMLDGRLRLKVTNTGSDWIEAVAESSGVITGGKAIVVEGKDYDISTPAEEDVEALKAISPIRDNIDYVAISLAKSCKDVDSVRSLLTELGFQSQVAVKIETKGAVNNLEELVQCSDYVVVARGDLGLHYGLDALPIVQRRIVHTSLKYGKPIAVATQLLDSMQSSPIPTRAEINDVFTTASMGVDSLWLTNETASGKYPLAAVSWLSRILMNVEYQIPQSPLLQNSRDRFAKGLVELAQDLGANILVFSMSGTLARRIAKFRPRGVVYVGTPNVRVARSLSIVWALEPLYIPAENYEEGLEKLISLKGTTPFVATYGIRGGVHSVKVKL

SEQ ID NO: 406 - protein, 491 aa, Anarthria scabra
SSSPVVSTIEEKNMGRIAQIIGPVLDVVFPPGELPNIYNALVVQGRDLVGQQINVTCEVQQLLGNNRVRAVAMSATDGLMRGMEVIDTGAPLNVPVGGATLGRIFNVLGKPVDNLGPVDTSTTSPIHRSAPAFIELDTKLSIFETGIKVVDLLAPYRRGGKIGLFGGAGVGKTVLIMELINNIAKAHGGVSVFGGVGERTREGNDLYIEMKESGVINEKNLAESKVALVYGQMNEPPGARMRVGLTALTMAEYFRDVNKLNVLLFIDNIFRFVQAGSEVSALLGRMPSAVGYQPTLSTEMGSLQERITSTKGGSITSIQAVYVPADDLTDPAPATTFAHLDATTVLSRGLAAKGIYPAVDPLDSTSTMLQPRIVGNEHYETAQKVKQTLQRYKELQDIIAILGLDELSEEDRLTVARARKIERFLSQPFFVAEVFTGSPGKYVGLTETIRGFQLILSGELDGLPEQAFYLVGNIEEASAKAMNLEGENKLK

SEQ ID NO: 407 - protein, 480 aa, Escherichia coli O157:H7
MSRRLRRTKIVTTLGPATDRDNNLEKVIAAGANVVRMNFSHGSPEDHKMRADKVREIAAKLGRHVAILGDLQGPKIRVSTFKEGKVFLNIGDKFLLDANLGKGEGDKEKVGINYKGLPADVVPGDILLLDDGRVQLKVLEVQGMKVFTEVTVGGPLSNNKGINKLGGGLSAEALTEKDKADIKTAALIGVDYLAVSFPRCGEDLNYARRLARDAGCDAKIVAKVERAEAVCSQDAMDDIILASDVVMVARGDLGVEIGDPELVGIQKALIRRARQLNRAVITATQMMESMITNPMPTRAEVMDVANAVLDGTDAVMLSAETAAGQYPSETVAAMARVCLGAEKIPSINVSKHRLDVQFDNVEEAIAMSAMYAANHLKGVTAIITMTESGRTALMTSRISSGLPIFAMSRHERTLNLTALYRGVTPVHFDSANDGVAAASEAVNLLRDKGYLMSGDLVIVTQGDVMSTVGSTNTTRILTVE

SEQ ID NO: 408 - protein, 424 aa, Escherichia coli
MTDKRKDGSGKLLYCSFCGKSQHEVRKLIAGPSVYICDECVDLCNDIIREEIKEVAPHRERSALPTPHEIRNHLDDYVIGQEQAKKVLAVAVYNHYKRLRNGDTSNGVELGKSNILLIGPTGSGKTLLAETLARLLDVPFTMADATTLTEAGYVGEDVENIIQKLLQKCDYDVQKAQRGIVYIDEIDKISRKSDNPSITRDVSGEGVQQALLKLIEGTVAAVPPQGGRKHPQQEFLQVDTSKILFICGGAFAGLDKVISHRVETGSGHWCWRSGKAKSDKASEGELLAQVEPEDLIKFGLIPEFIGRLPVVATLNELSEEALIQILKEPKNALTKQYQALFNLEGVDLEFRDEALDAIAKKAMARKTGARGLRSIVEAALLDTMYDLPSMEDVEKVVIDESVIDGQSKPLLIYGKPEAQQASGE

SEQ ID NO: 409 - protein, 801 aa, Euphorbia esula
AILIIHIPARFRNFNLNDQRFVKKGDKGVDLLASLCNQYDISEDELKKILEKTNNLIVDILKKTPRSASECKNENLENIDADGLVYYDDLMEEASLQSSLNILQRDYEDSTSCKGELDETVFINEEDSLLGSGNLSGGAVNVTGTKRKFDMISSPTKTISSPFSPTKTMSSPLSPFRSPASRSNGILGGLYSKIADTPVTTAMTTAKWLRTVISPLPSKPSSQLERFLTSCDRDVTNDVTRRAQIILEAIFPSSGLGKYSITGGLQNTNLMENIWAEQRRLEALKLSYRVLEAMCTAEAQVLHANNLTSLLTNERFHRCMLSCSAELVLATHKTVTMLFPAVLERTGITAFDLSKVIESFIRHEESLPRELRRHLNSLEERLLESMVWEKGSSMYNSLTVARPSLSSEINHLGLLAEPMPSLDAIAVRINFSSGSLPPLPSVQKQESSPGKSVDIRSPKRPCPDYRSVLVERNSFTSPVKDRLLALSNLKSKIPPPLQSAFASPTRPNPGGGGETCAETAISIFFCKINKLAAVRINGMIERLQQSHHHIRENVYRLFQQILSHRTSLFFNRHIDQIILCCFYGVAKISKVNLTFREIICNYRKQPQCKPQVFRSVFVDWSSSRQNGRTGQDHVDIITFYNEIFIPAAKPLLVEVGSSGTITKSTQVPEVINSKDGQCPQSPKVSPFPSLPDMSPKKVSASHNVYVSPLRTSKMDALISHSSKSYYACVGESTHAYQSPSKDLTAINNRLNSNRKVRGTLNFDDVDVGLVSDSMVANSLYLQNGSCASSSGALIKPEQPDT

SEQ ID NO: 410 - protein, 150 aa, Glycine max
MAAPRALVLAVLLAIAVANAEAASVVVGLAKCADCTRKNIKAEEAFKGLQVAIKCKNIDGDYESKAVGALDGTGAFSVPLAADLHGADCVAQLHSAASNAPCPGQEPSKIVPVSEGTTFGVVAGDNTATPSAASPECASMSLCGPIKKHI

SEQ ID NO: 411 - protein, 322 aa, Glycine max
MADAKAEAARQAPQSSQEEEEDWKEAEGDVEVADRSTSNGGGAGEGITDRPIRVYADGIYDLFHFGHARSLEQAKKSFPNAYLLVGCCNDELTHQYKGRTVMTEDERYESLRHCKWVDEVIPDAPWVVTEEFLNKHNIDFVAHDSLPYHDASGASNDVYEFVKKLGKFKETKRTEGISTSDIIMRIVKDYNEYVMRNLARGYSRNDLGVSYVKEKRLRVNMGLKTLRDKVKQHQEKVGEKWSTVAKLQEEWVENADRWVVGFLEKFEEGCHSMGTAIKERIQERLKEAQSRDFSLLQYDSDDFDDFEEEDDEVAKDAKYVKE

SEQ ID NO: 412 - protein, 371 aa, Triticum aestivum
TDNLLIRPHRRLSQPASPTRPPSNTPRAHHRRRRRPLPPSHPWRSHSRPPPPPPSPLPPRRRRPPPSRPPPRRRGAAPPRRGGSRSAGPRTPLPPSGRPPPPVAGDKRTISGTFTNLKEQDKIAFIPFIVAGDPDLATTAKALKVLDACGSDVIELGVPYSDPLADGPVIQASATRALTKGTTFEDVISMVKEVVPELSCPLALFTYYNPILKRGVANFMSVVKEAGVHGLVVPDVPLEETDILRSEAAKNNLELVLLTTPTTPTERMERITKASEGFVYLVSTTGVTGTRANVSFKVEALLKEIKQVTDKAVAVGFGVSTPEQVKQIAGWGADGVIVGSAMVRQLGESGSPEEGLKKLEELAKSLKAAFP

SEQ ID NO: 413 - protein, 331 aa, Brassica napus
MSNVTADPTADGPSTAVAVSNSTAIQTSPPTDRPVRVYADGIYDLFHFGHARSLEQAKKSFPNTYLLVGCCNDETTHKYKGRTVMTAEERYESLRHCKWVDEVIPDAPWVINQEFLDNHRIDYVAHDSLPYADTSGAGKDVYEFVKKVGRFKETMRTEGISTSDIIMRIVKDYNQYVMRNLDRGYSREDLGVSFVKEKRLRVNMRLKKLQERVKEQQEKVGEKIQTVKMLRNEWVENADRWVAGFLEIFEEGCHKMGTAIRDRIQERLIRQIPRNRLENGQDDDTDDQFYEEYFDHDMGSDEDEEERYYDEEEDVEEEKYKTVKPDAKDDK

SEQ ID NO: 414 - protein, 272 aa, Xanthomonas campestris pv. campestris str. ATCC 33913
MSRAPDRIAACFDALRHSGRKALIPFITAGDPSLEATVPVMHALVRAGANIIELGVPFSDPMADGPTIQRSSERALGRGAGLAYVIEAVQEFRREDATTPVVLMGYLNPIEIHGTRRFAETAVAAGIDGVLLVDLPPEEADETRAIFTEVGLALIALASPTTGEARLDMLCSTAQGYLYYVSFSGVTGAADRLDTHAASDRLRQLRARAGAPVVAGFGIKDAASAAAMAVDADGVVVGSALVAALADASDVRSARKRAEDFLQPLRQALDAG

SEQ ID NO: 415 - protein, 589 aa, Clostridium thermocellum ATCC 27405
MSQGTIVKVSGPLVIAEGMRDANMFDVVRVSEHRLIGEIIEMHGDRASIQVYEETAGLGPGEPVVSTGAPLSVELGPGLIENIFDGIQRPLVKMREMVGSNITRGIDVTALDRSKKWDFQPTVKKGDKVTAGDVIGKVQETSIVEHRIMVPYGVQGTIEEIKSGSFTVEETVAKVRTENNELVDICMMQKWPVRIGRPYREKLPPNAPLVTGQRVIDTLFPLAKGGVAAVPGPFGSGKTVVQHQLAKWADADIVVYIGCGERGNEMTDVLKEFPELKDPKTGESLMKRTVLIANTSDMPVAAREASIYTGMTIAEYFRDMGYSVALMADSTSRWAEALREMSGRLEEMPGEEGYPAYLGSRLAQFYERAGRVVCLGSDGREGALTAIGAVSPPGGDLSEPVTQATLRIIKVFWGLDSSLAYRRHFPAINWLQSYSLYLDIIGKWISENISRDWETLRSDTMRILQEEAELEEIVRLVGVDALSPSDRLTLEAAKSIREDYLHQNAFHEVDTYTSLNKQYRMLKLILGFYYSGKKALEAGVSIKELFELPVREKIGRAKYTPEDQVNSHFNEIEKELNEQIEALIAKEVQ

SEQ ID NO: 416 - protein, 696 aa, Triticum aestivum
  unsure (1)..(696): unsure at all Xaa locations
RCPRRRRRHAGRRAPRRPHAHFRGGRAAKPGPLPPPCRQVPGSLARACAAGPSCPERRAFPSATTPTEDNHSALDGAYGDSMTTLGESERESEYGSVRKISXPLVVAEGMGVAAMYELVRVGHDSLIGEIIRLEGDSATIQVYEETAGLTVNDPVLRTKKPLSCELGPGILGNIFDGIQRPLKTIAIKSGDVYIPRGVSVPALDKDQQWEFQANKLGVGDNITNGHLYATVFENTFMKHHAALPPGAMGKISYIAPAGQYSLQDRVLDLEFHGGKTDFTMLHSWPVRTPRLVAVKLAAEAPLLTGHRVDFALLPLVLGGTCAIPGAFGCGKTVISQALSKYSNSDTVVYVGCGERGNEMAEVLMDFPQLTMTLPDGREESVMKRTTLVANTSNMPVAAREASIYTGITIAEYFRDMGYNVSMMADSTSRWAEALREISGRLAEMPADSGYPAYLASRLASFYERAGKVQCLGSPDRTGSVTIVGAVSPPGGDFSDPVTSATLSIVQVFWGLDKKLAQRKHFPSVNWLISYSKYSTALEGYYEKFDPGFIDMRTKAREVLQREDDLNEIVQLVGKDALGESDKITLETAKLLREDYLAQNAFTPYDKYCPFYKSVWMMRNIIHFNTLANQAVERAANADGHKITYAVVKSRMGDLFYRLVSQKFEDPAEGEDVLIAKFQKLYDDLTTGFRNLEDEAR

SEQ ID NO: 417 - protein, 483 aa, Celosia argentea
SGSGVSTLEKKSLGRIAQIIGPVLDVAFPPGKMPNIYNALVVKGRDTTGQPINVTCEVQQLLGNNRVRAVAMSATDGLTRGMEVIDTGAPLSVPVGGTTLGRIFNVLGEPVDNLGPVDTSTTSPIHRSAPAFTQLDTKLSIFETGIKVVDLLAPYRRGGKIGLFGGAGVGKTVLIMELINNIAKAHGGVSVFGGVGERTREGNDLYMEMKESGVINEQNIAESKVALVYGQMNEPPGARMRVGLTALTMAEYFRDVNEQDVLLFIDNIFRFVQAGSEVSALLGRMPSAVGYQPTLSTEMGSLQERITSTKEGSITSIQAVYVPADDLTDPAPATTFAHLDATTVLSRGLAAKGIYPAVDPLDSTSTMLQPRIVGEEHYETAQRVKQTLQRYKELQDIIAILGLDELSEEDRLTVARARKIERFLSQPFFVAEVFTGSPGKYVGLAETIRGFQLILSGELDGLPEQAFYLVGNIDEATAKAMNL

SEQ ID NO: 418 - protein, 385 aa, Coleochaete sp. 528a3
RAVSMSATDGLMRGMDAIDTGAPLSVPVGEATLGRIFNVLGEPVDELGPVDSTTTFPIHRSAPAFTQLDTKLSIFETGIKVVDLLAPYRRGGKIGLFGGAGVGKTVLIMELINNIAKAHGGVSVFGGVGERTREGNDLYMEMKESKVINEENISESKVALVYGQMNEPPGARMRVGLTALTMAEYFRDVNKQDVLLFIDNIFRFVQAGSEVSALLGRMPSAVGYQPTLSTEMGTLQERITSTKEGSITSIQAVYVPADDLTDPAPATTFAHLDATTVLSRGLAAKGIYPAVDPLDSTSTMLQPWIVGKEHYETAQGVKQTLQRYKELQDIIAILGLDELSEEDRLTVARARKIERFLSQPFFVAEVFTGSPGKYVSLIETIKGFQ

SEQ ID NO: 419 - protein, 960 aa, Saccharomyces unisporus
ENMIGCAMYELVKVGHDNLVGEVIRIDGDKATIQVYEETAGVTVGDPVLRTGKPLSVELGPGLMETIYDGIQRPLKAIKDMSQSIYIPRGIDAPALSREIKWHFTPGKYTVGDHISGGDIFGSVFENSLLDDHKILLPPRARGTITWLAPEGDYTVDEKVIEVEFDGVKSDYSMYHTWPVRVPRPVAEKLSADYPLLTGQRVLDALFPCVQGGTTCIPGAFGCGKTVISQSLSKYSNSDTIIYVGCFEKGTEVLMADGTDKVIEDITIGEQVMGKDGQPREVVGLPRGKMTMYQVCHKATEQNEIALMDYVCSGNHKFVLVTPQNVKITEHMLRGKMYTSVNYFVANDFENGQVVKLRTKTFQHDIHGGADGAKVEAQKFASTIDLSPISWEIEASKYVELDVNVRNATTQLINPVFYESGKLASRLQTKNIDQTSADKLAYVMGSWVGAGSMDQPTFAGNQLDEEFVSRLTEYGSGLDLTKNNSVWDIINESGLRTLNANGEATKTIPKELVSDSISVREHFIAGLVDTQGNVKRASTGAVETASISTVYERISNDLVKLARSLGIKASVSQQEEHVDAKGVDQQQTYNIKLTGSALNGVVRLSALSKNRDEPVSFERLPVPFHFTLLEKAEDNYYGVTLPDATDKQYLLSSLALVHNCGERGNEMAEVLMEFPELFTEINGRKEPIMKRTTLVANTSNMPVAAREASIYTGITLAEYFRDQGKDVSMIADSSSRWAEALREISGRLGEMPADQGFPAYLGAKLASFYERAGKAVALGSPDRTGSVSIVAAVSPAGGDFSDPVTTSTLGITQVFWGLDKKLAQRKHFPSINTSVSYSKYTNVLNKYYDGNYPEFPILRDRMKEILSKAEELEQVVQLVGKSALSDGDKITLDVATLIKEDFLQQNGYSTYDAFCPIWKTFDMMKAFISYHDEAQKAVSNGANWSKLADATGDVKHAVSS

SEQ ID NO: 420 - protein, 322 aa, Rhodopseudomonas palustris
MTGFAVIRDDTPTAAIPKGAVVAMGNFDGVHRGHRAVIGACLDMARTKKAPALAVTFEPHPRKFFSPDVPQFRLTDETAKLRLLAGTGLDGAVILSFDARRASTTAHDFIQHELIGRLGVQGIAIGYDFHFGKGRGGSPSMLVAEAPSLGIEVDVQPHVDFGDHPVSSSAIRKCLEEGHIAAATEMLGGPWFVTGEVIHGDKRGRDLGYPTANIRLDPQCSLKHGIYAVRVGRGGRHYDAVANFGRRPTFDNGAPLLEVFVFDFNEPLYGETLDVAFIAFIRDEEKFESIEALIRQMDDDSARARAALAADHGAFPKLGALR

SEQ ID NO: 421 - protein, 257 aa, Glycine max
PGRPTRPPTRPYGCEKRAEGEAQEGSSQKKMGRGKIEIKRIENTTNRQVTFCKRRNGLLKKAYELSVLCDAEVALVVFSTRGRLYEYANNSVRATIERYKKANAAASNAESVSEANTQFYQQESSKLRRQIRDIQNLNRHILGEALGSLSLKELKNLEGRLEKGLSRVRSRKHETLFADVEFMQKREIELQNHNNYLRAKIAEHERAQQQQSNMMSGTLCESLPSQSYDRNFFPVNLIASDDQQQYSSQDHTALQLV

SEQ ID NO: 422 - protein, 610 aa, Pirellula sp.
MSSPSDDAILQSIRLYREALQQTLNLFVESGEIAEGSYGWLAGENASASVDNRNMPQQMADLHEGFVMKVFATMVPASSARNLEQRQLGRILLEHVWGETVQGSKLHEAIDWLITTAEGFSWYEVTRPFLELPSLRDRWGEVITAATRMAHLIAMVDGDDSSVERSRLQSMLDGLENAKQVAKSPTSVTAPTSPSDSPTVDHQADLDNAREAISWLRSEAKRLREGTGHDAANKPTPTRAGGGSPASTEPAKPSTKETAEQDDRTPEERLAEARAKLDRLIGLDAIKNQIQTLANFLAMERHRAKEGLPTTKPSLHMAFVGNPGTGKTTVARIIAEIYGGLGVLEKGHLVETDRSGLVAEYAGQTGPKTNAKIDEALDGVLFIDEAYTLIDESGQDQYGREAIQTLLKRMEDQRDRLVVILAGYPKEMTKMIRSNPGLSSRVGTTMHFDDYDPEALCRIFELIAAKAQYVIPTESRRRLLRGFTHLYFNRDRHFGNGRTSRNSFERSVRRLANRIAGSTEITRELLTTLEPSDIEIPDLTDAQLDAMTEPSGMIRVTCPHCDTPQVIEDTLMGTTTNCNSCSEPMEVQWGSPVIDLKAPAESNPEQDSPS

SEQ ID NO: 423 - protein, 211 aa, Glycine max
  unsure (1)..(211): unsure at all Xaa locations
MATPRALALCVLLAMAVAHTEAASVVVGLAKCADCTRKNMQAGEAFKAVQVAIKCKNSAGEYESKAVGGLDGTGAFSVPLAANLHGADCVAQLHSAVSNAPCPGQEPSXIVPVSEGTTYGVVAGENAATPSAASPECASMTLCGPIKKHIIEHFHHKKPVPPKPEPKPQPHPDYGPVPKPEPKPQPHPDYHPVPPTPTYGGGGGGGYHGHH

SEQ ID NO: 424 - protein, 419 aa, Listeria innocua
MFKFNDEKGQLKCSFCGKTQDQVRKLVAGPGVYICDECIELCNEIIEEELGISEFVDFGEVPKPQEIRHILSDYVIGQERAKKALAVAVYNHYKRINSNETKEDEVELSKSNICLIGPTGSGKTLLAQTLARILNVPFAIADATSLTEAGYVGEDVENILLKLIQSADYDVEKAEKGIIYIDEIDKVARKSENPSITRDVSGEGVQQALLKILEGTVASVPPQGGRKHPHQELIQIDTGNILFIVGGAFDGIEQIVKNRMGEKVIGFGTDNAKLKEDETYLSRVVPEDLLKFGLIPEFIGRLPVIATLEQLDEAALVSILTEPKNALVKQYKRMLELDDVELEFEPTALIEIAKEAIERKTGARGLRSIIEQIMLEVMFEIPSRDDITKCIITEKAARGEEEPQLQLEDGSIIPIKTSA

SEQ ID NO: 425 - protein, 499 aa, Ipomoea batatas
MAPIPGVMPIGNYVSLYVMLPLGVVNADNVFPDKEKVEDELKQVKAGGCDGVMVDVWWGIIEAKGPKQYDWSAYRELFQLVKKCGLKIQAIMSFHQCGGNVGDAVFIPIPQWILQIGDKNPDIFYTNRAGNRNQEYLSLGVDNQRLFQGRTALEMYRDFMESFRDNMADFLKAGDIVDIEVGCGAAGELRYPSYPETQGWVFPGIGEFQCYDKYMVADWKEAVKQAGNADWEMPGKGTGTYNDTPDKTEFFRPNGTYKTDMGKFFLTWYSNKLIIHGDQVLEEANKVFVGLRVNIAAKVSGIHWWYNHVSHAAELTAGFYNVAGRDGYRPIARMLARHHATLNFTCLEMRDSEQPAEAKSAPQELVQQVLSSGWKEYIDVAGENALPRYDATAYNQILLNVRPNGVNLNGPPKLKMSGLTYLRLSDDLLQTDNFELFKKFVKKMHADLDPSPNAISPAVLERSNSAITIDELMEATKGSRPFPWYDVTDMPVDGSNPFD

SEQ ID NO: 426 - protein, 487 aa, Dillenia retusa
  unsure (1)..(487): unsure at all Xaa locations
INPTTSGSGVSTXEKKSXGRIAQIIGPVLDVAFPPGKMPNIYNALLVXGRDTAGQXINVTCEVQQLLGNNRVRAVAMSATDGLMRGMEVIDTEAPLSVPVGGATLGRIFNVLGEPIDNLGPVDTRTTSPIHRSAPAFIQLDTKLSIFETGIKVVDLLAPYRRGGKIGLFGGAGVGKTVLIMELINNIAKAHGGVSVFGGVGERTREGNDLYMEMKESGVINEQNIAESKVALVYGQMNEPPGARMRVGLTALTMAEYFRDVNEQDVLLFIDNIFRFVQAGSEVSALLGRMPSAVGYQPTLSTEMGSLQERITSTKEGSITSIQAVYVPADDLTDPAPATTFAHLDATTVLSRGLAAKGIYPAVDPLDSTSTMLQPRIVGEEHYETAQKVKQTLQRYKELQDIIAILGLDELSEEDRLTVARARKIERFLSQPFFVAEVFTGSPGKYVGLTETIRGFQLILSGELDGLPEQAFYLVGNIXEATAKAMX

SEQ ID NO: 427 - protein, 452 aa, Helicobacter pylori J99
MNETLYCSFCKKPESRDPKKRRIIFASNLNKDVCVCEYCIDVMHGELHKYDSKYDRMDSLLALKRDRLRRMESSAYEEEFLLSRIPAPKELKAVLDNYVIGQEQAKKVFSVAVYNHYKRLSFKEKLKKQDNQDSDLELEHLEEVELSKSNILLIGPTGSGKTLMAQTLAKHLDIPIAISDATSLTEAGYVGEDVENILTRLLQASDWNVQKAQKGIVFIDEIDKISRLSEHRSITRDVSGEGVQQALLKIVEGSLVNIPPKGGRKHPEGNFIQIDTSDILFICAGAFDGLAEIIKKRTTQNVLGFTQEKMSKKEQEAILHLVQTHDLVTYGLIPELIGRLPVLSTLDSISLEAMVDILQKPKNALIKQYQQLFKMDEVDLIFEEEAIKEIAKLALERKTGARGLRAIIEDFCLDIMFDLPKLKGSEVRITKDCVLKQAEPLIIAKTHSKILP

SEQ ID NO: 428 - protein, 585 aa, Listeria monocytogenes EGD-e
MKKTKIVCTIGPASESVDTLVQLIEAGMNVARLNFSHGDFEEHGARIVNIREASKKTGKQVAILLDTKGPEIRTNDMVGGKLEFQTGDVVRVSMTPVEGTKEKFSVTYGELYDDVEIGSSILLDDGLIGLEVIEKDEANRELVTKVLNPGVLKNKKGVNVPNVSINLPGITEKDAADIRFGLEQGIDFIAASFVRRATDVLEITKILEEHNATHVQIIPKIENQEGVDNIDEILQVSQGLMVARGDLGVEIPAEEVPIVQKELIRKCNKLGKPVITATQMLDSMQRNPRPTRAEASDVANAIFDGTDAIMLSGETAAGDYPVEAVKMMAKIAVRTEEVLVAQDKFALKLHENTDMTEAIGQAVGHTAKNLNVQTIVAATQSGHTARMISKYRPKSHIVAVTFNEHVYRGLALSWGVYPRLATPVSNTDEMFDLAVKESLASGVAKQGDLIIITAGVPVTESGTTNVMKIQLIGEKVVKGQGIGSKSVIGKAIVAKSNAEALEKAEEGGILIVKTTDKEILPAFEKSAAVVVEEGGLTSHAAVVGINLGIPVIVGAKDATSLVKDGEIITVDSRQGVVYNGKTATH

SEQ ID NO: 429 - protein, 320 aa, Bacteroides thetaiotaomicron VPI-5482
MQIINDTSAMIPEPCVATIGFFDGVHMGHRYLIQQVKEIAAAKGLRSALVTFPVHPRKVMNAAYHPELLTTPEEKTNLLAGTGVDYCLMLDFTPDISRLTAKEFMTQILKERFQVKYLVIGYDHRFGHNRSEGFDDYVRYGQAIGIEVIRAQAYTDDIQIDTIQSAPVSSSLIRKLLHQGDVDAAARCLGYEYFLDGTVVGGYQVGRKIGFPTANLSVDDPDKLIPADGVYAVWVTFDGKTYMGMLNIGVRPTIGNGPNRTIEVNILHFHSDIYDKFIRLTFVKRTRPELKYDSIDELIAQLHKDAEETEAILLAAKQEK

SEQ ID NO: 430 - protein, 322 aa, Cicer arietinum
FNSWTGADCCHKWYGVSCDKETRRVADINLRGESEDPIFERAHRTGYMTGYISPAICKLTRLSSITVADWKNISGEIPRCITSLPFLRIIDLIGNRISSTIPSDIGRLHRLTVLNVADNAISGNIPPSLTNLRSLMHLDIRNNQISGPIPKDFGRLPMLSRALLSGNKISGPIPDSISRIYRLADLDLSRNQVSGPIPESLGKMAVLSTLNLDMNKLSGPIPASLFNSGISDLNLSRNGLNGNLPDVFGARSYFTVLDLSYNSLKGPIPKSMGLASYIGHLDLSYNHLCGKIPVGSPFDHLEASSFVYNDCLCGKPLKVCAN

SEQ ID NO: 431 - protein, 268 aa, Vibrio parahaemolyticus
MSRYEKMFARLNEKNQGAFVPFVTVCDPNAEQSYKIMETLVESGADALELGIPFSDPLADGPTIQGANIRALDSGATPDICFEQIGKIRAKYPDLPIGLLMYANLVYSRGIESFYERCAKAGIDSVLIADVPTNESAEFVAAAEKFGIHPIFIAPPTASDETLKQVSELGGGYTYLLSRAGVTGAETKANMPVDHMLEKLNQFDAPPALLGFGISEPAQVKQAIEAGAAGAISGSAVVKIIEAHVEQPQIMLDKLGELVSAMKAATQK

SEQ ID NO: 432 - protein, 150 aa, Glycine max
  unsure (1)..(150): unsure at all Xaa locations
MAAKMLALFALLALCASATSATHIPGHLPPVMPLGTMNPCMQYCMMQRGLASLMACPSLMLQQLLALPLQTMPVMMPQMMTPNMMSPLMMPSMMSPMVLPSMMSQMMMPQCHCDAVSQIMLQQXLPFMFNPMAMTIPPMFLQQPFVGAAF

SEQ ID NO: 433 - protein, 589 aa, Ferroplasma acidarmanus
MENKGSIYSISGPVVIATDLDGKMFDVVRVGEMGLVGEVIKIVGDKFTIQVYEDTSGLKPGEPVYSTGKPLSVELGPGLLKSIYDGIQRPLDIIQSETGDFIVRGATAPPLDEKKEWDFVPLLKEGDEVEQGYILGTVQETNIITHKIMVPYGIRGIIKSISKGKFKVSDTVCMIDTGTSKYDIKLKQIWPVRQARKVFLKFAPEIPLITGQRVIDSFFPVAKGGTVAVPGPFGSGKTVIQHQLSKWSDADITVYVGCGERGNEMTEILSTFPELQDPKSGKPLMEKTILIANTSNMPVAAREASIYTGVTIAEYYRDMGYDVALMADSTSRWAEALREISGRLEEMPGEEGYPAYLGRRISEFYERSGNAQIIAQDERTGSITLIGAVSPPGGDLSDPVVQNTLRVTRAFWALDASLASRRHFPSINWLNSYSLYLDSLSGWFKSNVNPEWPQMHSLMMGILQKESELQEIVQLVGYDSLPENQKNVLDIAKIIREDFLQQNAFDDTDTYCSIKKQYEMLTIIKTLNEMQEKSIASGLKLTQTATLPVRMKISRMKEIPENDFEKFYNDVIKEINNEYDNIMEGVESV

SEQ ID NO: 434 - protein, 514 aa, Triticum aestivum
  unsure (1)..(514): unsure at all Xaa locations
MATAVHQLSFSAPGAGGRGRQSRASASASHDGPATRWYPRIARVPLPKVPGEHGPXRWGALEDRLEYFYAPGGRDGFFAARVRAHRSTVVRLNMPPGPFVAXDPRVVALLDAASFPVLFDTSLVDKTDLFTGTFMPSTDLTGGYRVLSYVDPAEPNHAPLKSLLFHLLTHRRQHVIPTFREVYGGLFGRMENDLARVGKADFGNYNDDAAFGFLCQALLGRDPVDSPLRDEGPKLVAKWLLFQISPLLSLGLAGLPTLVEDGLLHSFRLPPALIKKDYGRLADFFRDAGKAVIDEGERLGIAREEAVHNILFAMCFNSFGGIKILFPSLVKWLGRAGGRVHGRLATEVRAVVRANGGEVTMRALAEMPLVKSAVYEALRIEPPVAMQYGRAKRDMVVESHDYGYEVREGELLFGYQPMATKDPRVFPRAEDYVPDRFLGEDGERLLRYVVWSNGPESATPTLQDKQCAGKDFVVLIARLLVAELFLRYDSFDVQVGSSPLGSSVTITSLKKATF

SEQ ID NO: 435 - protein, 444 aa, Primula palinuri
  unsure (1)..(444): unsure at all Xaa locations
NIYNALVVKGRDTAGQPINVTCEVPQLLGNNRVRAVAMSATDGLTRGMEVIDTGAALSVPVGGATLGRIFNVLGEPVDNLGPVDTRTTSPIHRSAPAFIQLDTELSIFETGIKVVDLLAPYRRGGKIGLFGGAGVGKTVLIMELINXIAKAHGGVSVFGGVGERTGEGNDLYMEMKESGVINEENIAESKVALVYGQMNEPPGARMRVGLTALTMAEYFRDVNEQDVLLFIDNIFRFVQAGSEVSALLGRMPSAVGYQPTLSTEMGSLQERITSTKEGSITSIQAVYVPADDLTDPAPATTFAHLDATTVLSRGLASKGIYPAVDPLDSTSTMLQPRIVGEEHYETAQRVKETLQRYKELQDIIAILGLDELSEEDRLTVARARKIERFLSQPFFVAEVFTGSPGKYVGLAETIRGFQLILSGELDGLPEQAFYLVGNIDEATA

SEQ ID NO: 436 - protein, 1013 aa, Arabidopsis thaliana
MEEVQPPVTPPIEPNGKRSEASLLDICEKVLSLDGSTCDEALKLFTETKRILSASMSNIGSGTREEVERFWFAFILYSVKRLSVRKEADGLSVSGDNEFNLCQILRALKLNIVDFFKELPQFVVKAGSVLGELYGADWENRLQAKEVQANFVHLSLLSKYYKRGFREFFLTYDANAEKNSANSSTYLLDSYRFGWLLFLALRNHAFSRFKDLVTCSNGVVSILAILIIHVPCRFRNFSIQDSSRFVKKGDKGVDLVASLCKIYDASEDELRIVIDKANNLVETILKKKPSPASECQTDKLDNIDPDGLTYFEDLLEETSISTSLITLEKDYYDGKGELDERVFINEEDSLLGSGSLSAGAVNITGVKRKIDALSSPARTFISPLSPHKSPAAKTNGISGATKLAATPVSTAMTTAKWLRTVISPLLPKPSPGLEHFLKSCDRDITNDVTRRAHIILEAIFPNSSLGAQCGGGSLQAVDLMDDIWAEQRRLEACKLYYRVLEAMCKAEAQILHANNLNSLLTNERFHRCMLACSAELVLATHKTITMLFPAVLERTGITAFDLSKVIESFIRHEDSLPRELRRHLNSLEERLLESMVWEKGSSMYNSLIVARPSLALEINQLGLLAEPIPSLDAIAALINFSDGANHASSVQKHETCPGQNGGIRSPKRLCTDYRSILVERNSFTSPVKDRLLALGNVKSKMLPPPLQSAFASPTRPNPGGGGETCAETGINIFFTKINKLAAVRINGMVERLQLSQQIRESVYCFFQHVLAQRTSLLFSRHIDQIILCCFYGVAKISQMSLTFREIIYNYRKQPQCKPLVFRSVYVDALQCRRQGRIGPDHVDIITFYNEIFIPAVKPLLVELGPVRNDRAVEANNKPEGQCPGSPKVSVFPSVPDMSPKKVSAVHNVYVSPLRGSKMDALISHSTKSYYACVGESTHAYQSPSKDLSAINNRLNNSSSNRKRTLNFDAEAGMVSDSMVANSLNLQNQNQNQNGSDASSSGGAAPLKTEPTDS

SEQ ID NO: 437 - protein, 498 aa, Oryza sativa (japonica cultivar-group)
MRTNPTTSRPGVSTIEEKSTGRIDQIIGPVLDVTFPPGKLPYIYNALVVKSRDTDGKQINVTCEVQQLLGNNRVRAVAMSATDGLMRGMEVIDTGAPLSVPVGGATLGRIFNVLGEPVDNLGPVDTSATFPIHRSAPAFIELDTKLSIFETGIKVVDLLAPYRRGGKIGLFGGAGVGKTVLIMELINNIAKAHGGVSVFGGVGERTREGNDLYMEMKESGVINEKNLEESKVALVYGQMNEPPGARMRVGLTALTMAEYFRDVNKQDVLLFIDNIFRFVQAGSEVSALLGRMPSAVGYQPTLSTEMGSLQERITSTKKGSITSIQAVYVPADDLTDPAPATTFAHLDATTVLSRGLASKGIYPTVDPLDSTSTMLQPRIVGNEHYETAQRVKQTLQRYKELQDIIAILGLDELSEEDRLTVARARKIERFLSQPFFVAEVFTGSPGKYVGLAETIRGFQLILSGELDGLPEQAFYLVGNIDEASTKAINLEEENKLKK

SEQ ID NO: 438 - protein, 475 aa, Epilobium angustifolium
  unsure (1)..(475): unsure at all Xaa locations
EKKXLGRIAQIIGPVLDVSFPPGKMPNIYNALVVKGRDTVGQEINVTCEVQQLLGNNRVRAVAMSATDGLTRGMEVIDTGGPLSVPVGGATLGRIFNVLGEPVDELGPVDTRTTSPIHRSAPAFIQLDTKLSIFETGIKVVDLLAPYRRGGKIGLFGGAGVGKTVLIMELINNIAKAHGGVSVFGGVGERTREGNDLYMEMKESGVINEQNIAESKVALVYGQMNEPPGARMRVGLTALTMAEYFRDVNKQDVLLFIDNIFRFVQAGSEVSALLGRMPSAVGYQPTLSTEMGSLQERITSTKEGSITSIQAVYVPADDLTDPAPATTFAHLDATTVLSRGLAAKGIYPAVDPLDSTSTMLQPRIVGDDHYETAQRVKETLQRYKELQDIISILGLDELSEEDRLTVARARKIERFLSQPFFVAEVFTGSPGKYVGLAETIRGFKLILSGELDGLPEQAFYLVGNIDEATAKAANL

SEQ ID NO: 439 - protein, 509 aa, Schizosaccharomyces pombe
MSSSAVSPKQWVAGLNSELDIPAVNRRTSIICTIGPKSNNVETLCKLRDAGMNIVRMNFSHGSYEYHQSVIDNARKASATNPLFPLAIALDTKGPEIRTGLTVGGTDYPISSGHEMIFTTDDAYAEKCNDKVMYIDYKNITKVIQPGRIIYVDDGILSFTVIEKVDDKNLKVRVNNNGKISSKKGVNLPKTDVDLPALSEKDKADLRFGVKNGVDMIFASFIRRAEDVIHIREVLGEEGKNIKIICKIENQQGVNNFDSILDVTDGIMVARGDLGIEIPASQVFVAQKMMIAKCNIAGKPVACATQMLESMTYNPRPTRAEVSDVGNAVLDGADLVMLSGETTKGSYPVEAVTYMAETARVAEASIPYGSLYQEMFGLVRRPLECATETTAVAAIGASIESDAKAIVVLSTSGNTARLCSKYRPSIPIVMVTRCPQRARQSHLNRGVYPVIYEKEPLSDWQKDVDARVAYGCQQAYKMNILKKGDKIIVLQGAVGGKGHTSIFRLTVAE

SEQ ID NO: 440 - protein, 489 aa, Planchonella pohlmaniana
  unsure (1)..(489): unsure at all Xaa locations
GXGASVLEKXNLGRIIQIIGPVLDVAFPPGKMPNIYNALVVKGRDTVGKPINVTCEVQQLLGNNRVRTVAMSATDGLMRGMEVIDTGAPLSVPVGGATLGRIFNVLGEPIDNLGPVDTRTTSPIHRSAPAFIQLDTKLSIFETGIKVVDLLAPYRRGGKIGLFGGAGVGKTVLIMELINNIAKAHGGVSVFGGVGERTREGNDLYMEMKESGVINEQNIAESKVALVYGQMNEPPGARMRVGLTALTMAEYFRDVNEQDVLLFIDNIFRFVQAGSEVSALLGRMPSAVGYQPTLSTEMGSLQERITSTKEGSITSIQAVYVPADDLTDPAPATTFAHLDATTVLSRGLAAKGIYPAVDPLDSTSTMLQPRIVGEEHYETAQKVKQTLQRYKELQDIIAILGLDELSEEDRLTVARARKIERFLSQPFFVAEVFTGSPGKYVGLAETIRGFQLILSGELDGLPEQAFYLVGNIDEATAKAMNLEMESXLK

SEQ ID NO: 441 - protein, 193 aa, Clostridium thermocellum ATCC 27405
MAMKKYKISLVIFDMDGLMFDTERIGVLGWHEAAKSFGIEIKQEFLRDMTGLNVKSIEKVFKKYYGNDLPFYDIRDLRVKYVLDYIEKNGMPVKPGLFELLDYLDHRGIMKAVATSTERKRTEKYLTLAGIRERFDAIVCGDEVERGKPEPDIFLEAARRTGKRPEECIVLEDSANGIKAASRAKCFRCLFLT

SEQ ID NO: 442 - protein, 195 aa, Glycine max
IFNDMLFSSALSRRATSYEMIRDYDQAASDIRRVVSLLINRNQHGISDRSISYANDLKHNQIWLSEIEEEAKKGIPLDMYLILGVEHSVSSSEIKKAYHKAALRHHPDKAGQSLARSDNGDDQIWKDIVEEISKDADRLFKIIGEAYAVLSDTAKRSQYDSEEEMRNSQKKRHGNSINRNNVIDQTDNRRHWKEV

SEQ ID NO: 443 - protein, 402 aa, Klebsormidium subtilissimum
LLGDNKVRAISMSATDGLMRGMKVTDTGAALSVPVGEATLGRIFNVLGEPVDNLGPVNNTKTFPIHRAAPAFTQLDTKLAIFETGIKVVDLLAPYRRGGKIGLFGGAGVGKTVLIMELINNIAKAHGGVSVFGGVGERTREGNDLYMEMKESKVINEQDISQSKVALVYGQMNEPPGARMRVGLTALTMAEYFRDVNKQDVLLFIDNIFRFVQAGSEVSALLGRMPSAVGYQPTLSTEMGGLQERITSTKDGSITSIQAVYVPADDLTDPAPATTFAHLDATTVLSRGLAAKGIYPAVDPLDSTSTMLQPWIVGEEHYEIAQGVKETLQRYKELQDIIAILGLDELSEEDRLTVARARKIERFLSQPFFVAEVFTGSPGKYVSLAETIKGFQFILSGQLDSL

SEQ ID NO: 444 - protein, 399 aa, Coleochaete sp. 327d3
ILGDNKVRAVSMSATDGLMRGMDVIDTGAPLSVPVGEATLGRIFNVLGEPVDELGPVDSTTTLPIHRSAPAFTQLDTKLSIFETGIKVVDLLAPYRRGGKIGLFGGAGVGKTVLIMELINNIAKAHGGVSVFGGVGERTREGNDLYMEMKESKVINEENISESKVALVYGQMNEPPGARMRVGLTALTMAEYFRDVNKQDVLLFIDNIFRFVQAGSEVSALLGRMPSAVGYQPTLSTEMGTLQERITSTKEGSITSIQAVYVPADDLTDPAPATTFAHLDATTVLSRGLAAKGIYPAVDPLDSTSTMLQPWIVGQEHYETAQGVKQTLQRYKELQDIIAILGLDELSEEDRLTVARARKIERFLSQPFFVAEVFTGSPGKYVSLIETIKGFQLILSGDL

SEQ ID NO: 445 - protein, 352 aa, Hevea brasiliensis
MAISSSTSGTSSSLPSRTTVMLLLFFFAASVGITDAQVGVCYGMQGNNLPPVSEVIALYKKSNITRMRIYDPNRAVLEALRGSNIELILGVPNSDLQSLTNPSNAKSWVQKNVRGFWSSVLFRYIAVGNEISPVNRGTAWLAQFVLPAMRNIHDAIRSAGLQDQIKVSTAIDLTLVGNSYPPSAGAFRDDVRSYLNPIIRFLSSIRSPLLANIYPYFTYAGNPRDISLPYALFTSPSVVVWDGQRGYKNLFDATLDVLYSALERASGGSLEVVVSESGWPSAGAFAATFDNGRTYLSNLIQHVKRGTPKRPNRAIETYLFAMFDENKKQPEVEKQFGLFFPDKWQKYNLNFG

SEQ ID NO: 446 - protein, 397 aa, Pyrus pyrifolia
MATTKFLLSLLLLVQLAATAYSIGVNYGTLGDNLPPPAKVADFIKTQTNIDAVKIFDTNPDIIKAFANTNISLTITIPNGDIPKLIKLRTAPRWVVDHVKPFYPASKIKYIAMGNEVLHWGDDALKSNLVPAMKTLHNALVREGIKDVKVSTPHSLGIMLSSDPPSMGRFRPEVIPILTQMLRFCRQTKSPFMVNPYPYFGWSPEKESYALFRPNNGAHDKFTGKFYTNMFDGLMDAVYSAAKAIGFGDVNLIAAETGWPSACEFPVCSVQNAVDYNGHLIKHIESGRGTPLMPNRKFETYIFALFNENQKPGPAAEKNFGLFKPDMTPVYNAGVMRNQQGGATPGPTMQIPTRPSTPAGPTTPAAPKRGKKGKPAGPAKSTTPATPATPASGGKKP

SEQ ID NO: 447 - protein, 488 aa, Rhopalocarpus sp. Chase 906
  unsure (1)..(488): unsure at all Xaa locations
SGVXTLXKRNLGRISQIIGPVLDVAFPPGKMPNIYNALVVKGRDTVGQQINVTCEVQQLLGNNRVRTVAMSATDGLMRGMEVIDTGAPLSVPVGGATLGRIFNVLGEPVDNFGPVDTRTTSPIHKPAPAFIQLDTKLSIFETGIKVVDLLAPYRRGGKIGLFGGAGVGKTVLIMELINNIAKAHGGVSVFGGVGERTREGNDLYMEMKESGVINEQNLAESKVALVYGQMNEPPGARMRVGLTALTMAEYFRDVNEQDVLLFIDNIFRFVQAGSEVSALLGRMPSAVGYQPTLSTEMGSLQERITSTKEGSITSIQAVYVPADDLTDPAPATTFAHLDATTVLSRGLAAKGIYPAVDPLDSTSTMLQPRIVGEEHYETAQRVKQTLQRYKELQDIIAILGLDELSEEDRLTVARARKIERFLSQPFFVAEVFTGSPGKYVGLAETIRGFKLILSGELDGLPEQAFYLVGNIDEATAKATNLEMESXXK

SEQ ID NO: 448 - protein, 450 aa, Aquifex aeolicus VF5
MTTKSLSELLEELTPKRVVEELNKYVVGQEEAKKAVAIALRNRWRRQKLPENLRNEVIPKNILMIGPTGVGKTEIARRLANLIKAPFVKVEATKYTEIGYVGRDVESMVRELVEVSFQMVKQEKMKEVRERARRLAEERLLDYLVPHQFTSFGIRESRDAGKREELRQKLRKGELDDRIVEIEVKEKTVPMVGIAGPPGLEELENQIKEMLSGLIPSKRRRKVKVKEALQILEQEEAEKLIDMEEVAREAIYRAENFGIIFIDEIDKIAVKTPGAGPGVSREGVQRDLLPILEGTTVNTKYGPVKTDHILFIGAGAFHMAKPSDLIPELQGRFPIRVELKPLTKEDFKRILVEPENALTKQYIELLKTENVYLEFTDDAIEEIARIAEEINTKTENIGARRLHTVMEKLLEDISFNAPEMAGQTIIIDAKFVKAKLENLVKDEELSRYIL

SEQ ID NO: 449 - protein, 479 aa, Ralstonia solanacearum
MTRATKIVATLGPSSNTLEILTRMIAAGVDVVRLNFSHGTAQDHVARAELVRETARAVGREVGIMADLQGPKIRVGKFESGKITLSPGERFTLDARCELGNQERVGLDYKELPRDVGPGDLLLLNDGLIVLQVERVVGEEIETVVKVGGDLSNNKGINRQGGGLSAPALTAKDMEDIKTAMALGADYIAVSFPKNATDMEMARQLAAVAGAPHSHKTKMIAKIERAEAIRPGVLEEILAASDGIMVARGDLAVEVGNAAVPALQKRMIKLAREANKLAITATQMMESMIVNPVPTRAEVSDVANAVLDGTDAVMLSAETAAGRYPVETIEAMAAICVEAEKSQPVHLDTDFLDQTFSRIDQSIAMGALFTAYHLQVKAIAALTDSGATALWMSRHGINVPIYAITPNVASQRKMALYRNVQPLPLAISLDRDEALRQAEELLVARGVVQRGDFIVLTVGEPMGQAGGTNTLKIVRVGMH

SEQ ID NO: 450 - protein, 257 aa, Listeria monocytogenes EGD-e
MTKTLTNKLAEKEHAAVVTYIMGGDGGLDNLEEQLLFLEKSGVSAIEIGIPFSDPVADGPIIQLAGLRALKEQVSLEAILNKLAMSKVQIPLIIMSYINPIFHLGIPKFVELVQKTPVKGLIIPDLPYEHQKLITPELQGTDIALIPLVSLTSPKERLEEIAKQAEGFIYAVTVNGTTGVRSEFDAHIDSHLAYLKSISPVPVLAGFGVSSIEHVEKFAHVCDGVIIGSKVVQMLHEEKTAELGAFLQKAAEVRIKN

SEQ ID NO: 451 - protein, 475 aa, Vicia faba var. minor
MTMEEKEEHSTEAAVTSHNDSKLFDDDDRVKRTGTVWTTSSHIITAVVGSGVLSLAWAIAQLGWIIGLSVMIFFSLITWYTSSLLSECYRTGDPHFGKRNYTFMEAVHTILGGFYDTLCGIVQYSNLYGTAVGYTIGASISMMAIKRSNCFHSSGGKDGCRISSNPYMISFGVIQIFFSQIPDFHEMWWLSIVAAIMSFTYSLIGLGLAIAKVAENGSFKGSITGVSIGTVTEAQKVWGVFQSLGNIAFAYSYSQILIEIQDTIKSPPSEMKTMKQATKISIGVTTIFYMLCGGMGYAAFGDLSPGNLLTGFGFYNPYWLIDIANAALIIHLVGAYQVYAQPLFAFVEKIMIKRWPKIKKEYKLTIPGFRPYHLNLFRLIWRTIFVITTTFISMLIPFFNDVLGLIGAAGFWPLTVYFPVEMYIKQKKITKWSYKWISMQTLSVICFVVSVVAFVGSVSSIVVDLKKYKPFTTDY

SEQ ID NO: 452 - protein, 243 aa, Glycine max
  unsure (1)..(243): unsure at all Xaa locations
YSLIILIRMVVLILFLAWRVKHXXTDAIWLWGMSVVCEIWFAFSWLLDQLPKLCPINRSTDLNVLRXXLEMPSPTNPTGKSDLPGIDVFVSTADPEKEPPLVTANTILSILAADYPVEXXXXXXXXXXXALLTFEAMAEAASFANVWVPFCRKHNIEPRNPESYFNLKRDPYXXKVKPDFVKDRRRVKREYDEFKVRINGLPDSXRRRSDAFHAREEIKAMKLQRQHNEDELVQPVKIPKHMG

SEQ ID NO: 453 - protein, 490 aa, Valdivia gayana
SGSGVSTLEKKNSGRIAQIIGPVLDVAFPPGKMPNIYNALVVKGRDTGGQPINVTCEVQQLLGNNRVRAVAMSATDGLTRGMEVIDTGAPLSVPVGGATLGRIFNVLGEPVDNLGPVDTRTTSPIHRSAPAFIQLDTKLSIFETGIKVVDLLAPYRRGGKIGLFGGAGVGKTVLIMELINNIAKAHGGVSVFGGVGERTREGNDLYMEMKESGVINEQNIGESKVALVYGQMNEPPGARMRVGLTALTMAEYFRDVNEQDVLLFIDNIFRFVQAGSEVSALLGRMPSAVGYQPTLSTEMGSLQERITSTKEGSITSIQAVYVPADDLTDPAPATTFAHLDATTVLSRGLAAKGIYPAVDPLDSTSTMLQPRIVGEEHYEIAQRVKQTLQRYKELQDIIAILGLDELSEEDRLTVARARKIERFLSQPFFVAEVFTGSPGKYVGLAETIRGFQLILSGELDGLPEQAFYLVGNIDEATAKAMNLEMESNLK

SEQ ID NO: 454 - protein, 424 aa, Bacillus halodurans
MFKFNDEKGQLKCSFCGKTQDQVRKLVAGPGVYICDECIELCTEIVEEELGTEEEVEFQEVPKPHEIREILDDYVIGQDLAKKSLSVAVYNHYKRINSMSKSEEVELSKSNICMIGPTGSGKTLLAQTLARILNVPFAIADATSLTEAGYVGEDVENILLKLIQAADYDVEKAEKGIIYIDEIDKVARKSENPSITRDVSGEGVQQALLKILEGTTASVPPQGGRKHPHQEFIQIDTTNILFICGGAFDGIEQIIKRRLGKKVIGFGSEVKQDELKPGEYLSKVLPEDLLRFGLIPEFIGRLPVISSLQPLDEEALIEILTKPKNALVKQYKKLLELDDVNLEFTDEALREIARKAIERKTGARGLRSIIEGLTLDVMFDLPARDDVETCIIHDKCVTEGEPPILKMKDGSEVAMTKPEPKESA

SEQ ID NO: 455 - protein, 461 aa, Magnetococcus sp. MC-1
MSEFTPREIVSELDRYIIGQNMAKRAVAIALRNRWRRQRLSAEMREEVYPKNILMIGPTGVGKTEIARRLAKLARAPFIKVEATKFTEVGYVGRDVESIVRDLVEMGITMVTEEAKVKVQFQAEDQAEERLLDILLPLPSTGQGEGSAHFGLFGQMEGSSVKPEPTAQQKESRQKMRKMLREGKLDDREIDIDLKEQRRVPMMEVITPQGMEGINLQDMLGGLMGGRTKTRRVKVGEAMKLLTEEEAGKLVDQDTVQQVAIERVEQSGIVFLDELDKVCARGSETRGGDVSREGVQRDLLPLVEGTTVSTKYGMVKSDHILFIASGAFQLAKPSDLLPELQGRLPIRVELESLGKGEFVRILTEPENALTRQYAALMGVENIELVFTDEGIEALAEIATRVNETAENIGARRLHTVMEKLLDELSFSAPDRGGERVVIDAAYVNRQLSDLAADEDLSRFIL

SEQ ID NO: 456 - protein, 481 aa, Allium altaicum
GVSTLEEKNLGRITQIIGPVLDVVFPRGKMPNIYNALVVKGRDTAGQQINVTCEVQQLLGNNRVRAVAMSATDGLTRGMEVIDTGAALSVPVGGATLGRIFNVLGEPVDNLGPVDTRTTSPIHRSAPAFIQLDTKLSIFETGIKVVDLLAPYRRGGKIGLFGGAGVGKTVLIMELINNIAKAHGGVSVFGGVGERTREGNDLYMEMKESGVINEKNIAESKVALVYGQMNEPPGARMRVGLTALTMAEYFRDINEQDVLLFIDNIFRFVQAGSEVSALLGRMPSAVGYQPTLSTEMGSLQERITSTKEGSITSIQAVYVPADDLTDPAPATTFAHLDATTVLSRGLAAKGIYPAVDPLDSTSTMLQPRIVGEEHYETAQRVKETLQRYKELQDIIAILGLDELSEEDRLTVARARKIERFLSQPFFVAEVFTGSPGKYVGLAETIRGFRLILSGELDSLPEQAFYLVGNIDEATAKAMNLE

SEQ ID NO: 457 - protein, 370 aa, Oryza sativa
  unsure (1)..(370): unsure at all Xaa locations
MINRCFCCVTGGDSDNRTSVDYPWETYTLKELLQATGNFSESNKLGEGGFGTVYWGRTSKGVEIAVKRLKAMTAKAEMEFAVEVEILGRVRHRNLLSLRGFYAGGDERLIVYDYMPNHSLLTHLHPHRGTPSSHHHVPLEWPRRVAIAVGAAEGLSYLHHEASPHIIHRDIKASNVLLDAEFVPKVADFGFAKLIPDGVSHLTTRVKGIGYLAPEYAMWGKVSESCDVYSFGVLLLELVSARRPLEKLPGGVKREIVQWAAPLVERRRWERLADPRLAGRFDAAQLRAVVETAMLCTQSSAESRPAMAEVVDMLRFSGGERXAPRRSSPXGGDGGRQQRRDHDDDRPGRRHRRQQRAAGQEELEIDEVEV

SEQ ID NO: 458 - protein, 498 aa, Verbascum thapsus
  unsure (1)..(498): unsure at all Xaa locations
XXXXXXXXXXGVSTLEKKNLGRIVQIIGPVLDVAFPPGKMPNIYNALVVKGRDTAGQPINVTCEVQQLLGNNRVRAVAMSATDGLTRGMEVIDTGAPLSVPVGGATLGRIFNVLGEPVDNLGPVDTSTTFPIHRSAPAFIQLDTKLSIFETGIKVVDLLAPYRRGGKIGLFGGAGVGKTVLIMELINNIAKAHGGVSVFGGVGERTREGNDLYMEMKESGVINQENIAESKVALVYGQMNEPPGARMRVGLTALTMAEYFRDVNEQDVLLFIDNIFRFVQAGSEVSALLGRMPSAVGYQPTLSTEMGSLQERITSTXEGSITSIQAVYVPADDLTDPAPATTFAHLDATTVLSRGLAAKGIYPAVDPLDSTSTMLQPRIVGEEHYETAQRVKQTLQRYKELQDIIAILGLDELSEEDRLTVARARKIERFLSQPFFVAEVFTGSPGKYVGLAETIRGFQLILSGELDGLPEQAFYLVGNIDEATAKAMNLEMESNLKK

SEQ ID NO: 459 - protein, 268 aa, Escherichia coli
MERYESLFAQLKERKEGAFVPFVTLGDPGIEQSLKIIDTLIEAGADALELGIPFSDPLADGPTIQNATLRAFAAGVTPAQCFEMLALIRQKHPTIPIGLLMYANLVFNKGIDEFYAQCEKVGVDSVLVADVPVEESAPFRQAALRHNVAPIFICPPNADDDLLRQIASYGRGYTYLLSRAGVTGAENRAALPLNHLVAKLKEYNAAPPLQGFGISAPDQVKAAIDAGAAGAISGSAIVKIIEQHINEPEKMLVALKVFVQPMKAATRS

SEQ ID NO: 460 - protein, 91 aa, Torulaspora delbrueckii
ISQSLSKYSNSDCIIYVGCGERGNEMAEVLMEFPELHTEKNGKMEPIMKRTTLVANTSNMPVAAREASIYTGITLAEYFRDQGRDVAMIAD

SEQ ID NO: 461 - protein, 309 aa, Oceanobacillus iheyensis HTE831
MAQVQGYKNGRINIILQDQKMMEQPKAESRTTVAKRMNSPLQLVDREFSSFVGLKDLKTSIKEIYASILINEKRKESGLKDSKQVLHMLFKGNPGTGKTTVARKLAKIYYEMNILSKGHFIEAERADLVGEYIGQTAQKTRAIIQRAMGGVLFIDEAYSLSRGGEKDFGKEAIDTLVKHMEDQHQDLVLILAGYPYEMERFLTFNPGLESRFPFILEFDDYDVEELMEIAKRMVDEREYKFTREAEWKLRNHLARKVRASSVNFSNARYVRNVIERAIRLHAVRLLSEDNYSSNDLMLLTGEDMLLDIE

SEQ ID NO: 462 - protein, 1031 aa, Saccharomyces cerevisiae
MIGCAMYELVKVGHDNLVGEVIRIDGDKATIQVYEETAGLTVGDPVLRTGKPLSVELGPGLMETIYDGIQRPLKAIKEESQSIYIPRGIDTPALDRTIKWQFTPGKFQVGDHISGGDIYGSVFENSLISSHKILLPPRSRGTITWIAPAGEYTLDEKILEVEFDGKKSDFTLYHTWPVRVPRPVTEKLSADYPLLTGQRVLDALFPCVQGGTTCIPGAFGCGKTVISQSLSKYSNSDAIIYVGCFAKGTNVLMADGSIECIENIEVGNKVMGKDGRPREVIKLPRGRETMYSVVQKSQHRAHKSDSSREVPELLKFTCNATHELVVRTPRSVRRLSRTIKGVEYFEVITFEMGQKKAPDGRIVELVKEVSKSYPISEGPERANELVESYRKASNKAYFEWTIEARDLSLLGSHVRKATYQTYAPILYENDHFFDYMQKSKFHLTIEGPKVLAYLLGLWIGDGLSDRATFSVDSRDTSLMERVTEYAEKLNLCAEYKDRKEPQVAKTVNLYSKVVRGNGIRNNLNTENPLWDAIVGLGFLKDGVKNIPSFLSTDNIGTRETFLAGLIDSDGYVTDEHGIKATIKTIHTSVRDGLVSLARSLGLVVSVNAEPAKVDMNGTKHKISYAIYMSGGDVLLNVLSKCAGSKKFRPAPAAAFARECRGFYFELQELKEDDYYGITLSDDSDHQFLLANQVVVHNCGERGNEMAEVLMEFPELYTEMSGTKEPIMKRTTLVANTSNMPVAAREASIYTGITLAEYFRDQGKNVSMIADSSSRWAEALREISGRLGEMPADQGFPAYLGAKLASFYERAGKAVALGSPDRTGSVSIVAAVSPADGDFSDPVTTATLGITQVFWGLDKKLAQRKHFPSINTSVSYSKYTNVLNKFYDSNYPEFPVLRDRMKEILSNAEELEQVVQLVGKSALSDSDKITLDVATLIKEDFLQQNGYSTYDAFCPIWKTFDMMRAFISYHDEAQKAVANGANWSKLADSTGDVKHAVSSSKFFEPSRGEKEVHGEFEKLLSTMQERFAESTD

SEQ ID NO: 463 - protein, 626 aa, Glycine max
  unsure (1)..(626): unsure at all Xaa locations
MPAVYGARLTXTFEDSEKESEYGYXVRKVSGPVVVADGMAGAAMYELVRVGHDNLIGEIIRLEGNSATIQVYEETAGLMVNDPVLXRTHKPLSVELGPGILGNIFDGIQRPLKTIAKRSGDVYIPRGVSVPALDKDTLWEFQPKKIGEGDLLTGGDLYATVFENSLMQHHIALPPDNMGKITYIAPPGQYSIKDTVLELEFQGVKKKFTMLQTWPVRTPRPVASKLAADTPLLTGQRVLDALFPSVLGGTCAIPGAFGCGKTVISQALSKYSNSDAVVYVGCGERGNEMAEVLMDFPQLTMTLPDGREESVMKRTTLVANTSNMPVAAREASIYTGITLAEYFRDMGYNVSMMADSTSRWAEALREISGRLAEMPADSGYPAYLAARLASFYERAGKVKCLGGPERTGSVTIVGAVSPPGGDFSDPVTSATLSIVQVFWGLDKKLAQRKHFPSVNWLISYSKYSTALETFYEQFDPDFINIRTKAREVLQREDDLNEIVQLVGKDALAEGDKITLETAKLLREDYLAQNAFTPYDKFCPFYKSVWMMRNIIHFYNLANQAVERGAGSDGQKISYTLIKHRMGDLFYRLVSQKFEDPAEGEAALVAKFQKLHEDLTNGFRNLEDETR

SEQ ID NO: 464 - protein, 470 aa, Escherichia coli
MKKTKIVCTIGPKTESEEMLAKMLDAGMNVMRLNFSHGDYAEHGQRIQNLRNVMSKTGKTAAILLDTKGPEIRTMKLEGGNDVSLKAGQTFTFTTDKSVIGNSEMVAVTYEGFTTDLSVGNTVLVDDGLIGMEVTAIEGNKVICKVLNNGDLGENKGVNLPGVSIALPALAEKDKQDLIFGCEQGVDFVAASFIRKRSDVIEIREHLKAHGGENIHIISKIENQEGLNNFDEILEASDGIMVARGDLGVEIPVEEVIFAQKMMIEKCIRARKVVITATMMLDSMIKNPRPTDAEAGDVANAILDGTDAVMLSGESAKGKYPLEAVSIMATICERTDRVMNSRLEFNNDNRKLRITEAVCRGAVETAEKLDAPLIVVATQGGKSARAVRKYFPDATILALTTNEKTAHQLVLSKGVVPQLVKEITSTDDFYRLGKELALQSGLAHKGDVVVMVSGALVPSGTTNTASVHVL

SEQ ID NO: 465 - protein, 284 aa, Ricinus communis
AIAQIGWIAGPAVMFLFSLVTYYTSTLLSACYRSGDPVNGKRNYTYMDAVRTNLGGAKVKLCGFVQYLNLFGVAIGYTIASSISMMAIKRSNCFHKSGGKNPCHINANPYMIAFGIAEIIFSQIPDFDQLWWLSILAAVMSFTYSTIGLGLGIAQVVENGKAMGSVTGISIGANVTPTQKIWRSFQALGDIAFAYSYSIILIEIQDTVRSPPSESKTMKKATLISVAVTTLFYMLCGCFGYAAFGDMSPGNLLTGFGFYNPYWLLDIANVAIVVHLVGAYQVFA

SEQ ID NO: 466 - protein, 237 aa, Enterococcus faecium
MNKIKLFIFDMDGLLLETGRLAYRAYVKSAQKYDYEMRKEVYYLLTGQTEMAIREQMGILYGEDVPYIKWREAINQYKEKIVKEDKRVYTKKGAEEILSFAKERGIHTIVASSNTRVKVEMYLKMENLYALFDQIISGDDVKKGKPEPEIFLKACSKMNIPPSEALVFEDSIAGIEAARRAGILSFLIKDHLIGLPDHNGKHKLKVDVSLYESNKADYEFYDLHQAKRFLESKGLYL

SEQ ID NO: 467 - protein, 268 aa, Xanthomonas axonopodis pv. citri str. 306
MRRIDSCFAELRANGRKALIPFITAGDPSLEATVPVMHALVRAGADVIELGVPFSDPMADGPTIQRSSERALARGAGLAYVLEAVHEFRREDATTPVVLMGYLNPIEIHGTRRFAEAAVAAGVDGVLLVDLPPEEAGETRTIFTEVGLALIALASPTTSEQRLDMLCSTAQGYLYYVSFAGVTGASNLLDTHAASDRLRQLRRRAGAPVVAGFGIKDAASAAAMAVDADGVVVGSALVAALAEVNDVRSARERAEAFLAPLRQALDQG

SEQ ID NO: 468 - protein, 428 aa, Streptomyces coelicolor A3(2)
MARIGDGGDLLKCSFCGKSQKQVKKLIAGPGVYICDECIDLCNEIIEEELAETSEVRWEELPKPREIYEFLESYVVGQEAAKKALSVAVYNHYKRVQAGENGGAQGREDAIELAKSNILLLGPTGSGKTLLAQTLARMLNVPFAIADATALTEAGYVGEDVENILLKLIQAADYDVKKAETGIIYIDEIDKVARKSENPSITRDVSGEGVQQALLKILEGTTASVPPQGGRKHPHQEFIQIDTTNVLFIVGGAFAGLEKIIEGRAGAKGIGFGAQIRSKREIESKDQFEQVMPEDLVKFGMIPEFIGRLPVITSVHNLDREALLQILVEPRNALVKQYERLFELDGVELDFERGALEAIADQAILRQTGARGLRAIMEEVLQGVMYEVPSRKDVARVVITADVVLSNVNPTLIPRDSRGRGPGEQKTA

SEQ ID NO: 469 - protein, 573 aa, Mycobacterium tuberculosis H37Rv
MTDRLASLFESAVSMLPMSEARSLDLFTEITNYDESACDAWIGRIRCGDTDRVTLFRAWYSRRNFGQLSGSVQISMSTLNARIAIGGLYGDITYPVTSPLAITMGFAACEAAQGNYADAMEALEAAPVAGSEHLVAWMKAVVYGAAERWTDVIDQVKSAGKWPDKFLAGAAGVAHGVAAANLALFTEAERRLTEANDSPAGEACARAIAWYLAMARRSQGNESAAVALLEWLQTTHPEPKVAAALKDPSYRLKTTTAEQIASRADPWDPGSVVTDNSGRERLLAEAQAELDRQIGLTRVKNQIERYRAATLMARVRAAKGMKVAQPSKHMIFTGPPGTGKTTIARVVANILAGLGVIAEPKLVETSRKDFVAEYEGQSAVKTAKTIDQALGGVLFIDEAYALVQERDGRTDPFGQEALDTLLARMENDRDRLVVIIAGYSSDIDRLLETNEGLRSRFATRIEFDTYSPEELLEIANVIAAADDSALTAEAAENFLQAAKQLEQRMLRGRRALDVAGNGRYARQLVEASEQCRDMRLAQVLDIDTLDEDRLREINGSDMAEAIAAVHAHLNMRE

SEQ ID NO: 470 - protein, 1071 aa, Saccharomyces cerevisiae
MAGAIENARKEIKRISLEDHAESEYGAIYSVSGPVVIAENMIGCAMYELVKVGHDNLVGEVIRIDGDKATIQVYEETAGLTVGDPVLRTGKPLSVELGPGLMETIYDGIQRPLKAIKEESQSIYIPRGIDTPALDRTIKWQFTPGKFQVGDHISGGDIYGSVFENSLISSHKILLPPRSRGTITWIAPAGEYTLDEKILEVEFDGKKSDFTLYHTWPVRVPRPVTEKLSADYPLLTGQRVLDALFPCVQGGTTCIPGAFGCGKTVISQSLSKYSNSDAIIYVGCFAKGTNVLMADGSIECIENIEVGNKVMGKDGRPREVIKLPRGRETMYSVVQKSQHRAHKSDSSREVPELLKFTCNATHELVVRTPRSVRRLSRTIKGVEYFEVITFEMGQKKAPDGRIVELVKEVSKSYPISEGPERANELVESYRKASNKAYFEWTIEARDLSLLGSHVRKATYQTYAPILYENDHFFDYMQKSKFHLTIEGPKVLAYLLGLWIGDGLSDRATFSVDSRDTSLMERVTEYAEKLNLCAEYKDRKEPQVAKTVNLYSKVVRGNGIRNNLNTENPLWDAIVGLGFLKDGVKNIPSFLSTDNIGTRETFLAGLIDSDGYVTDEHGIKATIKTIHTSVRDGLVSLARSLGLVVSVNAEPAKVDMNGTKHKISYAIYMSGGDVLLNVLSKCAGSKKFRPAPAAAFARECRGFYFELQELKEDDYYGITLSDDSDHQFLLANQVVVHNCGERGNEMAEVLMEFPELYTEMSGTKEPIMKRTTLVANTSNMPVAAREASIYTGITLAEYFRDQGKNVSMIADSSSRWAEALREISGRLGEMPADQGFPAYLGAKLASFYERAGKAVALGSPDRTGSVSIVAAVSPAGGDFSDPVTTATLGITQVFWGLDKKLAQRKHFPSINTSVSYSKYTNVLNKFYDSNYPEFPVLRDRMKEILSNAEELEQVVQLVGKSALSDSDKITLDVATLIKEDFLQQNGYSTYDAFCPIWKTFDMMRAFISYHDEAQKAVANGANWSKLADSTGDVKHAVSSSKFFEPSRGEKEVHGEFEKLLSTMQERFAESTD

SEQ ID NO: 471 - protein, 324 aa, Glycine max
MELARPASSRRKLKDLLLQSDNRLCADCNAPDPKWASANIGVFICLKCCGVHRSLGTHISKVLSVTLDDWSEDEIDAMMEVGGNASANSIYEAYIPEGYTKPGPDAGHEQRSKFIRSKYELQEFLKPSLRIVSGKSSLQSSSAKSSFMDSFKSTGSSQRMEGMVEFIGMLPVKVIKGTNLAIRDIKSSDPYVVLSLGQQTVQTTIIRSNLNPVWNEEYMLSVPEHYGQMKLKVFDHDTFSADDIMGEADIDLQSLITSAMAFGDAGMFGNMQIGKWLKSDDNALIEDSTVNIVDGKVKQMMSLKLQDVESGELDLELEWIPLEQ

SEQ ID NO: 472 - protein, 615 aa, Scherffelia dubia
MGRDSETREKDYGVIKKVSGPVVVADKIAGAGCYELVRVGDQNLIGEIIRLEGDTATIQCYEETAGLQVGDIVKRTYSPLAVELGPGLLGQIFDGIQRPLKAIAEASGDCFIPRGVSVPSLDRSHMWEFIPGALRMGDLATGGDIYGLVHENTLLDHRIMLPPGAKGRISYIAPPGQYTITEKVIELEFQGVKKEYSMMNLWPVRSPRPVAQKLLGSTPLLTGQRVLDAFFPSVLGGTCAIPGAFGCGKTVISQALSKFSNSDGIIYVGCGERGNEMAEVLYEFPALTMTMPDGREESIMKRTTLVANTSNMPVAAREASIYTGITLAEYFRDMGYNFSMMADSTSRWAEALREISGRLAEMPADSGYPAYLGARLASFYERSGRVKCLGSPGREGSVTIVGAVSPPGGDFSDPVTSATLGIVQVFWGLDKKLAQRKHLPSVNWLISYSKYEKSLEPFYEGFDSEFASIRRKAKDILAKEDGLNEIVQLVGKDALAESNKIILETARLIKEDYLQQNSFTKYDKYCPFYKAVLMLKNMVLFYDLSNAAVEKTMSSTDASKITLSIIKNRLGNLMYSLVSMKFEDPADGEEVVKGRLVELGNQLRDAFRSLEEEYR

SEQ ID NO: 473 - protein, 445 aa, Heteropyxis natalensis
ALVVKGRDTVGQEINVTCEVQQLLGNNRVRAVAMSATDGLMRGMEVIDTGAPLSVPVGGATLGRIFNVLGEPVDDLGPVDTRTTSPIHRSAPAFIQLDTKLSIFETGIKVVDLLAPYRRGGKIGLFGGAGVGKTVLIMELINNIAKAHGGVSVFGGVGERTREGNDLYMEMKESGVINEQNIAESKVALVYGQMNEPPGARMRVGLTALTMAEYFRDVNEQDVLLFIDNIFRFVQAGSEVSALLGRMPSAVGYQPTLSTEMGSLQERITSTKEGSITSIQAVYVPADDLTDPAPATTFAHLDATTVLSRGLAAKGIYPAVDPLDSTSTMLQPRIVGEEHYETAQRVKQTLQRYKELQDIIAILGLDELSEEDRLTVARARKIERFLSQPFFVAEVFTGSPGKYVGLAETIRGFRLILSGELDGLPEQAFYLVGNIDEAIAKATNL

SEQ ID NO: 474 - protein, 139 aa, Actinobacillus pleuropneumoniae serovar 1 str. 4074
MPVLAAEEFTQAAKKHGIQSVFICPPNADQATIERIARLTEGYTYLVSRAGVTSAENQAHAKNLDNLIESLKRSNSAPILQGFGIAKPEQVKEALVLGCDGAISGSAIVKIIERNLDSQTQLLSELAKFVSVMKAATKS

SEQ ID NO: 475 - protein, 482 aa, Agrobacterium vitis
MFIRNNRRSKIVATVGPASSSPDMLRSLFLAGVDTFRLNFSHGARADHAEVYRNIRALEQEHDAAIAVLQDLQGPKIRIGVLAHGRLDLARGSTIGFILGREGGEGMNDIPLPHREIFEVAVPGMDLLIDDGRIKVRIMEVMDGRLVCEVLNGGALSNRKGVNVPGAVLDISPLTAKDREDLEFGLELGVDWVALSFVQRARDMIEARSLVGDRAGLIAKIEKPSALDDIEDIVRLSDSVMVARGDLGVEIPPEDVPGKQKEIIRACRLAAKPVIVATQMLDSMVSSPTPTRAEASDVAGAIYDGADAVMLSAETATGAYPVEAVEIMNRIIEKTEKHKHYRPILEATEPDVAQSPPHAVATAAANVAVALGSPVVVAYTSSGTTAARISRARPALPILALTPSEQVARRLNMFWGVVGVRSQDVHTYEASLIHAQQAVQEAKLASPSDHIVIVAGFPFAQQGSTNNLRVVQIAATDNLEIA

SEQ ID NO: 476 - protein, 763 aa, Thermoplasma acidophilum
MGKIIRISGPVVVAEDVEDAKMYDVVKVGEMGLIGEIIKIEGNRSTIQVYEDTAGIRPDEKVENTRRPLSVELGPGILKSIYDGIQRPLDVIKITSGDFIARGLNPPALDRQKKWEFVPAVKKGETVFPGQILGTVQETSLITHRIMVPEGISGKVTMIADGEHRVEDVIATVSGNGKSYDIQMMTTWPVRKARRVQRKLLSRDPLVTAQSGNRCAFPVAEAANCRVPGPFGSGKCVSGDTPVLLDAGERRIGDLFMEAIRPKERGEIGQNEEIVRLHDSWRIYSMVGSEIVETVSHAIYHGKSNAIVNVRTENGREVRVTPVHKLFVKIGNSVIERPASEVNEGDEIAWPSVSENGDSQTVTTTLVLTFDRVVSKEMHSGVFDVYDLMVPDYGYNFIGGNGLIVLHNTVIQHQLAKWSDANIVVYIGCGERGNEMTEILTTFPELKDPNTGQPLMTGLSFIANTSNMPVAAREASIYTGITIAEYYRDMGYDVALMADSTSRWAEALREISGRLEEMPGEEGYPAYLGRRVSEFYERSGRARLVSPDERYGSITVIGAVSPPGGDISEPVSQNTLRVTRVFWALDAALANRRHFPSINWLNSYSLYTEDLRSWYDKNVSSEWSALRERAMEILQRESELQEVAQLVGYDAMPEKEKSILDVARIIREDFLQQSAFDEIDAYCSLKKQYLMLKAIMEIDTYQNKALDSGATMDNLASLAVREKLSRMKIVPEAQVESYYNDLVEEIHKEYGNFIGEKNAEASL

SEQ ID NO: 477 - protein, 537 aa, Cucumis melo
MSSIVIPSLQPHLRFPSSQETPQRSRSRVGFVSIRPIYATDGVSSSSSSSLQVPQRIVSPPEPTKLPLRKVPGDYGPPMFGALKDRHDYFYNQGREEYLKSRMLRYESTVYRTNMPPGPFITSDSRVVVLLDGKSFPVLFDHSKVEKKDLFTGTYMPVTELTGGYRVLSYIDPSEPDHAKLKQLIFFLLKHRRDKIMPEFHSTFSELFETLEKDLAAAGRAEYNASGEQAAFNFLARSLFGADPVDSKLGRDAPKLIAKWVLFQLGPVLSLGLPKVVEELLLRTVRLPPALIKADYRRLYDFFYKSSEAVFEEADRLGISREEACHNLLFTTCFNSFGGMKIFFPNMIKWIGRAGVNLHTRLAREIRTAVKANGGKITMGAMEQMPLMKSVVYEALRIEPPVPVQYGRAKKDLVVESHDAAFEIKEGEVICGYQPFATRDPKIFDRADELVPDRFTGEGEELLKHVIWSNGPETQSPSVQNKQCAGKDFIVFISRLLVVELFLRYDSFDIEASNTPLGAAVTVSAAVTVTSLKKASF

SEQ ID NO: 478 - protein, 440 aa, Pseudomonas aeruginosa
MPAPLSPLIVRMRHAIEGCRPIQIRGRVTQVTGTLLKAVVPGVRIGELCQLRNPDQSLALLAEVIGFQQHQALLTPLGEMLGVSSNTEVSPTGGMHRVAVGEHLLGQVLDGLGRPFDGSPPAEPAAWYPVYRDAPQPMSRRLIERPLSLGVRAIDGLLTCGEGQRMGIFAAAGGGKSTLLASLVRNAEVDVTVLALVGERGREVREFIESDLGEQGLRRSVLVVATSDRPAMERAKAGFVATSIAEYFRDQGRRVLLLMDSLTRFARAQREIGLAAGEPPTRRGYPPSVFAALPRLMERAGQSERGSITALYTVLVEGDDMSEPVADETRSILDGHIVLSRKLAAANHYPAIDVLHSVSRVMNQIVDDDQRHAAGRLREWLAKYEEVELLLKIGEYQKGQDSEADQAIEKIGAIRQWLRQGTHETSDYAQACAQLRSLCA

SEQ ID NO: 479 - protein, 573 aa, Mycobacterium leprae
MIDRLGSLFESAASMLPMSEARSFELFTEITNYDETACDAWIGRIRCGDTDRVTLFRAWYSRRNFGQLSGSVQIPMTTLNARVPIGGLYGDITYPVTSPLAITMGFAACEAAQGNFADAMEAIDATSITGSEHLVAWLKAVVYGAAERWTDVIDEVKGAGKWPDKFLAGAAGVAHGVAAANLGLFTEAERRLTEANDSPAGEACARSIAWYLAMARRSQGNEDAAVALLEWLQTTHPESKVSAALKDPSYRLTTTTAEQIAARADPWDPSSVVTDNSDRDRLLTQAQAELDRQIGLTRVKTQIERYRAATMMAKVRAAKGMKVAQPSKHMIFTGPPGTGKTTIARVVANILAGLGVISEPKLVETSRKDFVAEYEGQSAVKAAKTIDLALGGVLFIDEAYALVQERDGRTDPFGQEALDTLLARMENDRDRLVVIIAGYSSDIDRLLETNEGLRSRFATRIEFDTYSPDELLEIAKVIATDADSSLSAEASKNLLEAAKQLAQRTLRGRPALDVAGNGRYARQLVEAAEQCRDMRLARGVDIEQLDVDRLQEINGSDMAEAIATVHAHLNIRE

SEQ ID NO: 480 - protein, 359 aa, Arabidopsis thaliana
MDSLALAPQVYSRKDKSLGVLVANFLTLYNRPDVDLFGLDDAAAKLGVERRRIYDVVNILESIGLVARSGKNQYSWKGFGAVPRALSELKEEGMKEKFAIVPFVAKSEMVVYEKEGEESFMLSPDDQEFSPSPRPDNRKERTLWLLAQNFVKLFLCSDDDLVTFDSATKALLNESQDMNMRKKVRRLYDIANVFSSMKLIEKTHVPETKKPAYRWLGSKTIFENRFIDGSASLCDRNVPKKRAFGTELTNVNAKRNKSGCSKEDSKRNGNQNTSIVIKQEQCDDVKPDVKNFASGSSTPAGTSESNDMGNNIRPRGRLGVIEALSTLYQPSYCNPELLGLFAHYNETFRSYQEEFGREK

SEQ ID NO: 481 - protein, 377 aa, Glycine max
MSVAKKLIRCVILDLDGTLLNTDGIVGNVLKVMLGTAGARADSARAQKIIGTTPFEAAAAVVQDYQLPCSAIEFLSEISPLFSDQWCNIKALPGANRLVKHLKSHGVPMALASNSPRESIEAKISYHDGWKNSFSVIIGGDEVRTGKPSPEIFLEAARRLNMEPSSCLVIEDSLPGVTAGKTAEMEVVVVPSLPKQSHLYTAADEVINSLLDLRLEKWGLPPFEDWVEGTLPVDPWYIGGPVVKGFGRGSKVLGIPTANLSTEGYSDLLSEYPAGVYFGWAGLSARGVFKMVMSIGWNPYFNNKEKAIEPWLLHDFNEDFYGEELRLVIVGYIRPEVNFSSLESLVAKIHEDRRVAERALDLPLYSSFKNDSYLRSS

SEQ ID NO: 482 - protein, 476 aa, Clavija eggersiana
LGRIIQIIGPVLDVSFPPGKMPNIYNALVVKGRDTAGQPINVTCEVQQLLGNNRVRAVAMSATDGLTRGMEVIDTGAALSVPVGGATLGRIFNVLGEPIDNLGPVDTRTTSPIHRSAPAFIQLDTKLSIFETGIKVVDLLAPYRRGGKIGLFGGAGVGKTVLIMELINNIAKAHGGVSVFGGVGERTREGNDLYMEMKESGVINEENIAESKVALVYGQMNEPPGARMRVGLTALTMAEYFRDVNEQDVLLFIDNIFRFVQAGSEVSALLGRMPSAVGYQPTLSTEMGSLQERITSTKEGSITSIQAVYVPADDLTDPAPATTFAHLDATTVLSRGLAAKGIYPAVDPLDSTSTMLQPQIVGEEHYETAQRVKQTLQRYKELQDIIAILGLDELSEEDRLTVARARKIERFLSQPFFVAEVFTGSPGKYVGLAETIRGFQLILSGELDGLPEQAFYLVGNIDEATAKAMKLEMESN

SEQ ID NO: 483 - protein, 225 aa, Mycoplasma pulmonis
MFLRLILIKAIIFDLDGVIVETASLHFLAWKHEVAKLGINFTKEQNTSLKGLNRIDTLKAILKLHNYKLSDEKIEEIAQSKNQYYQRLLDQELNSSTILPNIKNFLDQAKKNNLKLALASSSHNAKFILKKVELLSYFDFIVNPSEIKNGKPNPEIFLKALEGLNLKASEAIGIEDALAGIYGLRQAKIFAIAISNGENENWSEANLVLNTTKELDLDKILKSFS

SEQ ID NO: 484 - protein, 242 aa, Shigella boydii
LKERKEGAFVPFVTLRDPGIEQSLKIIDTLIEAGADALELGIPFSDPLADGPTIQNATLRAFAAGVTPAQCFEMLALIRQKHPTIPIGLLMYANLVFNKGIDEFYAQCEKVGVDSVLVADVPVEESAPFRQAALRHNVAPIFICPPNADDDLLRQIASYGRGYTYLLSRAGVTGAENRAALPLNHLVAKLKEYNAAPPLQGFGISAPDQVKAAIDAGAAGAISGSAIVKIIEQHINEPEKML

SEQ ID NO: 485 - protein, 526 aa, Aspergillus niger
MAASSSLDHLSNRMKLEWHSKLNTEMVPSKNFRRTSIIGTIGPKTNSVEKINSLRTAGLNVVRMNFSHGSYQYHQSVIDNAREAAKTQVGRPLAIALDTKGPEIRTGNTPDDKDIPIKQGHELNITTDEQYATASDDKNMYLDYKNITKVISPGKLIYVDDGILSFEVLEVVDDKTIRVRCLNNGNISSRKGVNLPGTDVDLPALSEKDIADLKFGVRNKVDMVFASFIRRGSDIRHIREVLGEEGKEIQIIAKIENQQGVNNFDEILEETDGVMVARGDLGIEIPAPKVFIAQKMMIAKCNIKGKPVICATQMLESMTYNPRPTRAEVSDVANAVLDGADCVMLSGETAKGNYPNEAVKMMSETCLLAEVAIPHFNVFDELRNLAPRPTDTVESIAMAAVSASLELNAGAIVVLTTSGKTARYLSKYRPVCPIVMVTRNPAASRYSHLYRGVWPFLFPEKKPDFNVKVWQEDVDRRLKWGINHALKLGIINKGDNIVCVQGWRGGMGHTNTVRVVPAEENLGLAE

SEQ ID NO: 486 - protein, 500 aa, Streptococcus agalactiae NEM316
MNKRVKIVATLGPAVEFRGGKKFGESGYWGESLDVEASAEKIAQLIKEGANVFRFNFSHGDHAEQGARMATVRKAEEIAGQKVGFLLDTKGPEIRTELFEDGSDFHSYTTGTKLRVATKQGIKSTPEVIALNVAGGLDIFDDVEVGKQILVDDGKLGLTVFAKDKDTREFEVVVENDGLIGKQKGVNIPYTKIPFPALAERDNADIRFGLEQGLNFIAISFVRTAKDVNEVRAICEETGNGHVKLFAKIENQQGIDNIDEIIEAADGIMIARGDMGIEVPFEMVPVYQKMIITKVNAAGKAVITATNMLETMTDKPRATRSEVSDVFNAVIDGTDATMLSGESANGKYPVESVRTMATIDKNAQTLLNEYGRLDSSAFPRNNKTDVIASAVKDATHSMDIKLVVTITETGNTARAISKFRPDADILAVTFDEKVQRSLMINWGVIPVLADKPASTDDMFEVAERVALEAGLVESGDNIVIVAGVPVGTGGTNTMRVRTVK

SEQ ID NO: 487 - protein, 369 aa, Nicotiana sp.
MSTSHKHNTPQMAAITLLGLLLVASSIDIAGAQSIGVCYGMLGNNLPNHWEVIQLYKSRNIGRLRLYDPNHGALQALKGSNIEVMLGLPNSDVKHIASGMEHARWWVQKNVKDFWPDVKIKYIAVGNEISPVTGTSYLTSFLTPAMVNIYKAIGEAGLGNNIKVSTSVDMTLIGNSYPPSQGSFRNDARWFVDPIVGFLRDTRAPLLVNIYPYFSYSNPGQISLPYSLFTAPNVVVQDGSRQYRNLFDAMLDSVYAALERSGGASVGIVVSESGWPSAGAFGATYDNAATYLRNLIQHAKEGSPRKPGPIETYIFAMFDENNKNPELEKHFGLFSPNKQPKYNINFGVSGGVWDSSVETNATASLVSEM

SEQ ID NO: 488 - protein, 490 aa, Erycibe hellwigii
MRINPTTSGSEVSAVEKKNLGRIVQIIGPVLDVAFTPGKMPNIYNALVVQGRDNEKANVTCEVQQLLGNNRVRAVAMSDTDGLMRGMEVIDTGAPISVPVGGSTLGRIFNVLGKPVDNLGPVDTGTTSPIHRRAPAFIQLDTKLSIFETGIKVVDLLAPYRRGGKIGLFGGAGVGKTVLIMELINNIAKAHGGVSVFGGVGERTREGNDLYMEMKESGVINEENIAESKVALVYGPMNEPPGARMRVGLTALTMAEYFRDVNEQDVLLFIDNIFRFVQAGSEVSALLGRMPSAVGYQPTLSTEMGSLQERITSTKEGSITSIQAVYVPADDLTDPAPATTFAHLDATTVLSRGLAAKGIYPAVDPLDSTSTMLQPRIVGEEHYETAQRVKQTLQRYKELQDIIAILGLDELSEEDRLTVARARKIERFLSQPFFVAEVFTGSPGKYVGLTETIRGFQLILSGELDGLPEQAFYLVGNIDEATAKAMNLKT

SEQ ID NO: 489 - protein, 775 aa, Bacillus halodurans
MCQNERTIEQFEAELQAFLNGTKAFSEARGLQWLSWLEENEQYTKGKADLLALIAGARLQRKGEADKRTKQWLDEGLNLEPENPRLLTLELQQVIEAIRDLPLPATFPTIRETDHGTVKKKTALRYFELAEQFFEHESSYRKALDQGQQGAEATGDEHKKQAFVQLNKLFTSLREPLLFIVKATEEYAHSVSGVYYSKSQFQQIRQAVEEIEALHREWTQVIAQMEEEAQHPSSPLDELEKMVGLEDVKRRVHHHYQFLKYQAERKKAGYQFLDEMSLHMILTGNPGTGKTRLARLFAQLYYELGLLERNEVLEVDRSQLVGGFVGQSEENTKALIEKAAGGVLFIDEAYSLKREGASGNDYGQAVIDTLVAAMTSGKYAGTFALILAGYPVEMEQFLRSNPGLRSRFPEQNQIHLSDYSIDELLLIGEQVALDNDFTLTDGARLALKQRIEEAQVDESFGNGRTVKNIVMNAIFQKGAKVQLDQAHVEDFALLTREDFLQEDDEHKEEGAIDRLEQLIGLADVKRELKQLTSFAKVQQMRRDKGMTTIPIQLHSIFSGNPGTGKTTVAKLFAEALQEIGLLKRGHVSIVSRSDLVAGFVGQTALKTKERIRDALGGVLFIDEAYSLFKGGQDFGKEAVDTLVDEMTKQGENLVVIMAGYPKEMEELLTANPGLKSRFKKVFTFADYTKAELQAMIDYHSEQYGYHLDEEARRQVGQLLPESGHPSNGRFAVDLLERAIQRQAIRITEIEEDISEEQLMTLTGRDFIEEKGGDVR

SEQ ID NO: 490 - protein, 158 aa, Glycine max
FGSSGSVSSLAWFMSNQETSFVTIGQRVLARPLKVRFHYGHPDVFDRIFHITRGGISKASCGINLSEDIFAGFNSTLRRGNITHHEYIQCGKGRDVGLNQISLFEAKVACGNGEQTLSRDIYRLGHRFDFFRMLSCYFTTIGFYISSMIVGLTCYAFL

SEQ ID NO: 491 - protein, 534 aa, Oryza sativa
MPPPRASAILSAACRSSRTLFVIRRLGFLGSCTPTVRQNASVELPGAGLYPRFHQSILPIHCVVGSLRLCHSTALDGSKDVHVSEIVKILKSRDGDSELAEVLNQFADEMDEDVVLKVLQKQRSNWKVALSFFKWAAGLPQYNHGSRAYTEMLDILGRMKKVRLMRQLFDEIPVESRQSVVTNRMFAVLLNRYAGAHKVQEAIDMFYKRKDYGFELDLVGFQILLMSLCRYKHVEEAEALFLQKKDEFPPVIKSWNIILNGWCVKGSLADAKRVWNEIIASKLKPDLFTYGTFINSLTKSGKLSTAVKLFTSMWEKGINPDVAICNCIIDQLCFKKRIPEALEIFGEMNDRGCQADVATYNTLIKHFCKINRMEKVYELLDDMEVKGVSPNNMTYSYILKTTEKPKDVISLMQRMEKSGCRLDSDTYNLILNLYVSWDYEKGVQLVWDEMERNGSGPDQRSFTIMVHGLHSHDKLDEALHYYRTMESRGMTPEPRTKLLVKAIRMKKDEPATEEPLTRKNLKLDPISRLFHVRK

SEQ ID NO: 492 - protein, 359 aa, Saccharomyces cerevisiae
MALVSRRSTRSESTSITKEEHTGEGSLTKLFFRWLVTLEGDQDINDGKGYISLPNVSNYIFFLGGRFRTVKGAKPLWLGVLLAIVCPMVLFSIFEAHKLWHTQNGYKVLVIFFYYFWVITLASFIRTATSDPGVLPRNIHLSQLRNNYQIPQEYYNLITLPTHSSISKDITIKYCPSCRIWRPPRSSHCSTCNVCVMVHDHHCIWVNNCIGKRNYRFFLIFLLGAILSSVILLTNCAIHIARESGGPRDCPVAILLLCYAGLTLWYPAILFTYHIFMAGNQQTTREFLKGIGSKKNPVFHRVVKEENIYNKGSFLKNMGHLMLEPRGPSFVSARKPHEAGDWRFMDLSPAHSFEKIQKI

SEQ ID NO: 493 - protein, 317 aa, Xanthobacter flavus
MLDVATSAPSAALPAEAAEGRLDLGALFTESEVPEFLAELDEGLIGLKPVKRRIREIAAHLVIGRAREKLGLTSGAPTLHMAFTGNPGTGKTTVALKMAQILHRLGYVRRGHLVSVTRDDLVGQYIGHTAPKTKEILKKAMGGVLFIDEAYYLYRPENERDYGQEAIEILLQVMENQRDDLVVILAGYKDRMDRFFESNPGFRSRIAHHIDFPDYEDAELVEIAKTMAADADYTFSPEAEVAIEEYVAKRRLQPNFANARSIRNALDRMRLRQSLRLFESGGLADRAALSTISEGDVRASRVFAGGIDAPDYKPQTE

SEQ ID NO: 494 - protein, 846 aa, Trichodesmium erythraeum IMS101
MTVERITTGLNLQFGDRFLILYGSNTSDSFCTPDLLLQDIEQVLHQYLQSQNFQRILFYSGVQKLYFLDQQSRDLCRQQPQNTAHNSAPAPKMRVKSGPLGRKRRLLEQEKPTPTPAPTNSATPRLQDTQVIPIWEKVMTDNQQKSAIVFSNAEDLAEFDNKRELFGRFVNWSRLPPSNHNICILIFHHENRSELQQFCQTIGLTFLANLMANRDRSHTQWFNFHRLNGPNIGEIIALQNYFRLEHQKPVDWKSVESLPVYMAAENRSLNYWYDRYLTSEEISLTQARQQNWLSGNISTQPALERLEQMIGLQTVKDKIRGWMRKLEVESDRQRQGLTQESPRLHLVFKGNPGTGKTTVARLIGEIYRDLGLLARGHVREVARGDLVAGYVGQTAIQTNEAVDDALDGVLFIDEAYTLSQGGNADFGQEAIDTLLKRMEDNRDRLAVIVAGYPTPMDEFINSNPGLQRRLATEIVFEDYTPEELLTIFRQRVSRVQSSIAPQLEDTLRKLLTQLYESRNENFGNAGLVENLFNKMDNLRASRVIEANLDPIREPFQVEDLPPQYQAGGSKEENLADLLEELENKIGLNSVKSAIREIVNNQLANQQLEAAGLPAGGTETLHMIFSGNPGTGKTTVARLVGKIFKALGLLRQGHFTEVVRRDLVAEYVGQTAIKTAEVVKSALDGVLFVDEAYALTRGSSANDFGPEAIDTLVPALENYRDRMVAIFAGYSREMEQFIAANPGIESRVAYRIEFPDYSGREMLQIFLSMCHRDQRICPSNVSVVLGNIFTYMYQNRGANFGNARDVRNLYEQMVKRLKNRIVQYNLLGEKMLKFTIEDIPNKYKLNK

SEQ ID NO: 495 - protein, 490 aa, Cardwellia sublimis
GPGVSALEEKNPGRIAQIIGPVLDVAFPPGKMPNIYNALIVKGRDTVGQQINVTCEVQQLLGNNRVRAVAMSATDGLMRGMEVIDTGAPLSVPVGGATLGRIFNVLGEPVDNLGPVDTRTTSPIHRSAPAFIQLDTKLSIFETGIKVVDLLAPYRRGGKIGLFGGAGVGKTVLIMELINNIAKAHGGVSVFGGVGERTREGNDLYMEMKESGVINEQNIAESKVALVYGQMNEPPGARMRVGLTALTMAEYFRDVNEQDVLLFIDNIFRFVQAGSEVSALLGRMPSAVGYQPTLSTEMGSLQERITSTKEGSITSIQAVYVPADDLTDPAPATTFAHLDATTVLSRGLAAKGIYPAVDPLDSTSTMLQPRIVGEEHYETAQRVKQTLQRYKELQDIIAILGLDELSEEDRLTVARARKIERFLSQPFFVAEVFTGSPGKYVGLAETIRGFQLILSGELDGLPEQAFYLVGNIDEATAKAMNLEVESNLKK

SEQ ID NO: 496 - protein, 225 aa, Salmonella typhimurium LT2
MPEEARVQCKGFLFDLDGTLVDSLPAVERAWCSWADRFNLAHDEVLGFIHGKQAITSLRHFMAGKSEAEIAAEFTRLEQIEATETAGITALPGAVDLLNHLNKVGIPWAIVTSGSMPVARARHQVAGLPAPEVFVTAERVKRGKPEPDAYLLGAQLLGLAPQECVVVEDAPAGVLSGLAAGCHVIAVNAPADTPRLADVDFALDSLTQLSVAKQPNGDVVVLRKT

SEQ ID NO: 497 - protein, 490 aa, Bellendena montana
GPGVSILEEKNLGRIAQIIGPVLDIAFPPGKMPNIYNALVVKGRDTVSQQINVTCEVQQLLGNNRVRAVAMSATDGLTRGMEVIDTGASLSVPVGGATLGRIFNVLGEPVDNLGPVDTRTTSPIHRSAPAFIQLDTKLSIFETGIKVVDLLAPYRRGGKIGLFGGAGVGKTVLIMELINNIAKAHGGVSVFGGVGERTREGNDLYMEMKESGVINEQNFAESKVALVYGQMNEPPGARMRVGLTALTMAEYFRDVNEQDVLLFIDNIFRFVQAGSEVSALLGRMPSAVGYQPTLSTEMGSLQERITSTKEGSITSIQAVYVPADDLTDPAPATTFAHLDATTVLSRGLAAKGIYPAVDPLDSTSTMLQPRIVGEEHYETAQRVKQTLQRYKELQDIIAILGLDELSEEDRLTVARARKIERFLSQPFFVAEVFTGSPGKYVGLAETIRGFQLILSGELDGLPEQAFYLVGNIDEATAKAMNLEVESNLKK

SEQ ID NO: 498 - protein, 464 aa, Cytophaga hutchinsonii
MTALQGFLTPTEIVAELDKYIIGQHDAKRNVAIALRNRWRRMHADADMRKEIMPNNILLIGPTGVGKTEIARRLAKLADAPFTKVEASKFTEVGYVGRDVESMVRDLVEQAVNMVKTQKKEEVKIKVSQVVEDILLDLLIPPVKSTGMGFKTASTQSIDTNEIPDNDQELNERTRELFREKIRSGELDERKVEINVQQQGPGVGVVGGAMDEASMMNIQEMIGNMMPKKTKKRKLSIAEARKILLEEESAKLIDMDDVKDEAIRKTENMGIIFIDEIDKVASSKKGNGPDVSREGVQRDLLPIVEGSAVNTKYGTVHTDHILFIAAGAFHVSKPSDLIPELQGRFPIRVELNSLTEADFYHILKEPKNALTRQYQALLSSENVNIEFHDDALKAISEIAFELNVEVENIGARRLHTVMSHLLNELLFDVPDKIETHSTVVITKELVDQKLKGLVKNRDLSQFIL

SEQ ID NO: 499 - protein, 426 aa, Azotobacter vinelandii
MTDTRNGEDNGKLLYCSFCGKSQHEVRKLIAGPSVFICDECVDLCNDIIREEVQEAQAESSAHKLPAPKEISTILDQYVIGQERAKKVLAVAVYNHYKRLNQRDKKDDVELGKSNILLIGPTGSGKTLLAETLARLLNVPFTIADATTLTEAGYVGEDVENIIQKLLQKCDYDVEKAQMGIVYIDEIDKISRKSDNPSITRDVSGEGVQQALLKLIEGTVASVPPQGGRKHPQQEFLQVDTRNILFICGGAFSGLEKVIQNRSTKGGIGFNAEVRSPDVGKKIGEALRDVEPDDLVKFGLIPEFVGRLPVIATLDELDEAALVQILTEPKNALTKQYGKLFEMEGVELEFRPDALRAVALRALERKTGARGLRSILEGVLLDTMYEIPSQSGVSKVVIDESVIAGASKPLLIYENVEPPAKAAPDA

SEQ ID NO: 500 - protein, 424 aa, Rhodopseudomonas palustris
MSKVGTSDSKNTLYCSFCGKSQHEVRKLIAGPTVFICDECVELCMDIIREENKSSLVKSRDGIPTPKEICKVLDDYVIGQNHAKKVLSVAVHNHYKRLNHQTKHNDVELAKSNILLIGPTGSGKTLLAQTLARILDVPFTMADATTLTEAGYVGEDVENIILKLLQAADYNVERAQRGIVYIDEIDKISRKSDNPSITRDVSGEGVQQALLKIMEGTVASVPPQGGRKHPQQEFLQVDTTNILFICGGAFAGLEKIISSRGRTTSIGFAAQVLAPEDRRTGEIFRHVEPEDLLKYGLIPEFVGRLPVVATLEDLDENSLKKILTDPKNALVKQYQRLFEMENVELTFADEALGAVARKAIERKTGARGLRSILESILLETMFDLPGLEGVEEVVISREVVDGTARPLYIYADRTDRAAETSASA

SEQ ID NO: 501 - protein, 467 aa, Staphylococcus aureus subsp. aureus Mu50
MDTAGIRLTPKEIVSKLNEYIVGQNDAKRKVAIALRNRYRRSLLDEESKQEISPKNILMIGPTGVGKTEIARRMAKVVGAPFIKVEATKFTELGYVGRDVESMVRDLVDVSVRLVKAQKKSLVQDEATAKANEKLVKLLVPSMKKKASQTNNPLESLFGGAIPNFGQNNEDEEEPPTEEIKTKRSEIKRQLEEGKLEKEKVRIKVEQDPGALGMLGTNQNQQMQEMMNQLMPKKKVEREVAVETARKILADSYADELIDQESANQEALELAEQMGIIFIDEIDKVATNNHNSGQDVSRQGVQRDILPILEGSVIQTKYGTVNTEHMLFIGAGAFHVSKPSDLIPELQGRFPIRVELDSLSVEDFVRILTEPKLSLIKQYEALLQTEEVTVNFTDEAITRLAEIAYQVNQDTDNIGARRLHTILEKMLEDLSFEAPSMPNAVVDITPQYVDDKLKSISTNKDLSAFIL

SEQ ID NO: 502 - protein, 492 aa, Spigelia marilandica
  unsure (1)..(492): unsure at all Xaa locations
TSGSGVSTLEKKNLGRIVQIIGPVLDAAFPPAKMPNIYXALVVKGRDTVGQPINVTCEVQQLLGNNRVRAVAMSATDGLMRGMEVIDTGAPLSVPVGGATLGRIFNVLGEPVDNLGPVDTGTTSPIHRSAPAFIQLDTKLSIFETGIKVVDLLAPYRRGGKIGLFGGAGVGKTVLIMELINNIAKAHGGVSVFGGVGERTREGNDLYMEMKESGVINEENIAESKVALVYGQMNEPPGARMRVGLTALTMAEYFRDVNEQDVLLFIDNIFRFVQAGSEVSALLGRMPSAVGYQPTLSTEMGSLQERITSTKEGSITSIQAVYVPADDLTDPAPATTFAHLDATTVLSRGLAAKGIYPAVDPLDSTSTMLQPRIVGEEHYETAQRVKQTLQRYKELQDIIAILGLDELSEEDRLTVARARKIERFLSQPFFVAEVFTGSPGKYVGLAETIRGFQLILSGELDSLPEQAFYLVGNIDEATAKAMNLEMENSLKK

SEQ ID NO: 503 - protein, 101 aa, Nepenthes alata
VAAREASIYTGITIAEYFRDMGYNVSMMADSTSRWAEALREISGRLAEMPADSGYPAYLAARLASFYERAGKVKCLGSPERTGSVTIVGAVSPPGGDFSDP

SEQ ID NO: 504 - protein, 203 aa, Oryza sativa
  unsure (1)..(203): unsure at all Xaa locations
XEEIAMASLRRALDEFSSLQADDGHWPGDFSGVMFIMPGLIFALYVTGSLDTIISPEHRREICRYIYNHQNEDGGWGSLMLSSSTMFGTCSNYITLRLLGEETSNEXXLAKGRIWIILHGGTTFVPQWGKIWLSILGVYEWAGNNPIFPELWLTPQFLPFHPGKFWCLTRMVYLPMAYLYGKKFVGPTAPTILALREEIYSAX

SEQ ID NO: 505 - protein, 476 aa, Lycopersicon esculentum
MGDSTNFAAKHPVSINITESKLFDDDGRIKRSGSVWTASAHIITAVIGSGVLSLAWAVAQLGWIAGPIVMLLFSFVTYYTSSLLSDCYRSGDPLFGKRNYTYMDVVQANLSGLQVKICGWIQYVNLFGVAIGYTIASSISLMAVKRSDCFHKHGHKAPCLQPNTPYMIIFGVIEIIFSQIPDFDQIWWLSIVAAVMSFTYSTIGLGLGIAHVAETGKIGGSLTGVSIGTVTEMQKVWRTFQALGAIAFAYSYSLILIEIQDTIKSPPSEAKTMKNATIISVSVTTVFYMLCGCFGYAAFGDHAPDNLLTGFGFYDPYWLLDIANIAIFVHLVGAYQVYCQPLFAFIEKTAAEWYPNSKIITKNISVPIPGFKSYNIYLFRLVWRTIFVIISTIISMLLPFFSDIVGILGAFGFWPLTVYYPVEIYIVQKKIPKWSRKWFGLQILSVTCLIVSIAAAVGSFAGVVSDLKVYKPFKFT

SEQ ID NO: 506 - protein, 608 aa, Arabidopsis thaliana
MGGLIDLNVMETEEDETQTQTPSSASGSVSPTSSSSASVSVVSSNSAGGGVCLELWHACAGPLISLPKRGSLVLYFPQGHLEQAPDFSAAIYGLPPHVFCRILDVKLHAETTTDEVYAQVSLLPESEDIERKVREGIIDVDGGEEDYEVLKRSNTPHMFCKTLTASDTSTHGGFSVPRRAAEDCFPPLDYSQPRPSQELLARDLHGLEWRFRHIYRGQPRRHLLTTGWSAFVNKKKLVSGDAVLFLRGDDGKLRLGVRRASQIEGTAALSAQYNQNMNHNNFSEVAHAISTHSVFSISYNPKASWSNFIIPAPKFLKVVDYPFCIGMRFKARVESEDASERRSPGIISGISDLDPIRWPGSKWRCLLVRWDDIVANGHQQRVSPWEIEPSGSISNSGSFVTTGPKRSRIGISSGKPDIPVSEGIRATDFEESLRFQRVLQGQEIFPGFINTCSDGGAGARRGRFKGTEFGDSYGFHKVLQGQETVPAYSITDHRQQHGLSQRNIWCGPFQNFSTRILPPSVSSSPSSVLLTNSNSPNGRLEDHHGGSGRCRLFGFPLTDETTAVASATAVPCVEGNSMKGASAVQSNHHHSQGRDIYAMRDMLLDIAL

SEQ ID NO: 507 - protein, 415 aa, Wigglesworthia glossinidia endosymbiont of Glossina brevipalpis
MIDNRKNVSNKFLCCSFCGKNQNEVKKLIAGMSVYICDECVILCNNIVQEEKKQLEFSLYENMYLPKPCEIFNYLNSYVIGQETAKKILSVSVYNHYKKLKNLKSNNKVELGKSNVLLIGPTGSGKTLLAETLARFLKVPFIISDATTLTEAGYVGEDVENVIQRLLNKCDFDIKKAQHGIIYIDEIDKISRKSDNPSITRDVSGEGVQQALLKLIEGTISAVPKKGGRKHPQQEFFHVDTTNILFICGGAFSGLNKIIEQRVLVKNSIGFNVDINNKLNINNKKNFLSQVQPEDLIKFGLIPEFVGRLPIISVLKELNISELIEILIQPKNALVKQYKLLFNLEGVELEFNENALISIAKESLHKKTGARGLRSIIEHILLDTMYSLPSKKNVQKIVINDGVILRKEKPLFIFN

SEQ ID NO: 508 - protein, 490 aa, Oryza sativa (indica cultivar-group)
MVVVVVGALLFHLVVTALAAPVALPGCPETCGNVTVPYPFGIGHGCFRDGFELACDETHPAAPPKLRFARNGVEVIDISLPSGTVRVATRMLGTGSSSSLPRQLNGSWPAGLPANGSLAVSTRHNRFVAMGCNLLANLVANDDDDYISVCAALCVVRSALPRDAAAASSCSGFGCCQTPVARGLPSYGVHLNDLTQRSVTVGSYGAAFIADGEWFAGEQRSLQLGFVADPRKLADSTAVPTVLEWSLDMDRDQDMFWYDTRVSQWTRCVSVHSAIDDAVDGNLYGRARCNCSKGYEGNPYLANGCQGDAVTGRDGRAGEAWAAAEAEQGAGAAGFGRRRGATSSRRRARPPPPRSPAIAALARHTCLLRPPPLSPDPPPVTLVNCAERIWRKTAPSFAHDESTTTTPTIGLASLYCIVMASSSSAAEAAARWVRLQWRGVATRGRSKKTKTSAWVQWAAGLLMEAAQTIRSAMRWRSGWSELDSTCNGDQ

SEQ ID NO: 509 - protein, 487 aa, Dicranostyles villosus
MRINPTTSGSEVSAVEKKNLGRIVQIIGPVLDVAFPPGKMPNIYNALVVQGRDNNVTCEVQQLLGNNRVRAVAMSDTDGLMRGMEVIDTGAPISVAVGGATLGRIFNVLGEPVDNLGPVDTNTTSPIHRSAPAFIQLDTKLSIFETGIKVVDLLAPYRRGGKIGLFGGAGVGKTVLIMELINNIAKAHGGVSVFGGVGERTREGNDLYLEMKESRMINEENIAESKVALVYGQMNEPPGARMRVGLTALTMAEYFRDVNEQDVLLFIDNIFRFVQAGSEVSALLGRMPSAVGYQPTLSTEMGSLQERITSTKEGSITSIQAVYVPADDLTDPAPATTFAHLDATTVLSRGLAAKGIYPAVDPLDSTSTMLQPRIVGEEHYETAQRVKQTLQRYKELQDIIAILGLDELSEEDRLTVARARKIERFLSQPFFVAEVFTGSPGKYVGLAETIRGFQLILSGELDGLPEQAFYLVGNIDEATAKAMNLKT

SEQ ID NO: 510 - protein, 496 aa, Hedychium flavum
MRTNPTTSSPVVSTLEEKNLGRIAQIIGPVLDVVFPPGKMPNIYNALVVKGRDTVGQQINVTCEVQQLLGNNRVRAVAMSATDGLTRGMDVIDTGAPLSIPVGGATLGRIFNVLGEPVDNLGPVDTSTTSPIHRPAPAFIELDTKFSIFETGIKVVDLLAPYRRGGKIGLFGGAGVGKTVLIMELINNIAKAHGGVSVFGGVGERTREGNDLYIEMKESGVINEKNIAESKVALVYGQMNEPPGARMRVGLTALTMAEYFRDVNEQNVLLFIDNIFRFVQAGSEVSALLGRMPSAVGYQPTLSTEMGSLQERITSTKKGSITSIQAVYVPADDLTDPAPATTFAHLDATTVLSRGLAAKGIYPAVDPLDSTSTMLQPRIVGEEHYETAQRVKQTSQRYKELQDIIAILGLDELSEEDRLTVARARKIERFLSQPFFVAEVFTGSPGKYVGLAETIRGFQLILSGELDSLPEQAFYLVGNIDEATAKAINLEEEGKL

SEQ ID NO: 511 - protein, 455 aa, Borrelia burgdorferi B31
MCLRRLKMNKLEEHYIVPKDVVAELDKYIIGQDEAKKLVSIALVNRYIRSRLPKEIKDEVMPKNIIMIGSTGIGKTEIARRLSKLIKAPFIKVEATKYTEVGYVGRDVESMVRDLMSIAVNMVKEEMYSTVRDDALVRTEERIVDSLFKGSSNSENMDPNEIKAEEKVKEKLRKKLRAGELDDTTIEIQISSKMPFSTIEIFTGGNFEEIDMGIGGLLGNIFDRKKKRELKIKKAKEIILAEELEKLVDHENISDIAKSKVENMGIIFIDEIDKIAAKNRSGNDVSREGVQRDILPIIEGSKVNTKYGIVDTSHILFIAAGAFNLAKPSDLIPELQGRFPIKVELKSLSIDDLKKILKQTKNSLIKQYVAMFKVYDLDLKFSEEAIDRIAELTFNMNLESENLGARRLHGVMEIVLADLFFEVPGSKLKKFEINLDYVNKKIQINEQKDLNYYII

SEQ ID NO: 512 - protein, 485 aa, Hydrolea sp. Chase 3245
GSGVSTLEKKNPGRVVQIIGPVLDVAFPPGKMPNIYNALVVQGRDSLGQPINVTCEVQQLLGNNRVRTVAMSATDGLTRGMEVIDTGAAISVPVGGSTLGRIFNVLGEPVDDLGPVDASTTSPIHRSAPAFIQLETKLSIFETGIKVVDLLAPYRRGGKIGLFGGAGVGKTVLIMELINNIAKAHGGVSVFGGVGERTREGNDLYKEMKESKVINEENIEESKVALVYGQMNEPPGARMRVGLTALTMAEYFRDVNNQDVLLFIDNILRFVQAGSEVSALLGRMPSAVGYQPTLSTEMGSLQERITSTKEGSITSIQAVYVPADDLTDPAPATTFAHLDATTVLSRGLAAKGIYPAVDPLDSTSTMLQPRIVGDEHYQTAQKVKQTLQRYKELQDIIAILGLDELSEEDRLTVARARKIERFLSQPFFVAEVFTNSPGKYVGLAETIRGFQSILSGEFDGLPEQAFYLVGNIDEAKEKAIKLEKE

SEQ ID NO: 513 - protein, 242 aa, Escherichia coli
LKERKEGAFVPFVTLGDPGIEQSLKIIDTLIEAGADALELGIPFSDPLADGPTIQNATLRAFAAGVTPAQCFEMLALIRQKHPTIPIGLLMYANLVFNKGIDEFYAQCEKVGVDSVLVADVPVEESAPFRQAALRHNVAPIFICPPNADDDLLRQIASYGRGYTYLLSRAGVTGAENRAALPLNHLVAKLKEYNAAPSLQGFGIFAPDQVKAAIDAGAAGAIFVSAIVKIFGQHFNEPEKML

SEQ ID NO: 514 - protein, 587 aa, Methanocaldococcus jannaschii
MPVVGKIIKIAGPVVVAEGMKGAQMYEVVKVGEEKLTGEIIQLHDDKAVIQVYEETSGIKPGEPVVGTGAPLSVELGPGMLRAMYDGIQRPLTAIEEKTGSIFIPRGVDVPALPRDIKWEFKPVVNEGDYVEEGDIIGTVDETPSIVHKILVPIGVKGKIVEIKEGKFTVEETVAVVETENGERKEITMMQKWPVRKPRPYKEKLPPEIPLITGQRVEDTFFTLAKGGTAAIPGPFGSGKTVTQHQLAKWSDADVVVYIGCGERGNEMTEVIEEFPHLEDIRTGNKLMDRTVLIANTSNMPVAAREASVYTGITIAEYFRDMGYGVLLTADSTSRWAEAMREISGRLEEMPGEEGYPAYLASRLAQFYERAGRVITLGKDNRQGFVCIVGAVSPPGGDFSEPVTSNTLRIVKVFWALDANLARRRHFPAINWLQSYSLYIDDVTEWWNTNTGPDWRQLRDEAMSLLQKEAELQEIVQLVGPDALPDRERVILEVARMLREDFLQQDAFDEVDTYCPPMKQYLMLKIIMTFYQEALKAVERGVEPAKILGVSVKQDIARMKYIPHDEFINVKSKEIMEKIKNELGSLN

SEQ ID NO: 515 - protein, 243 aa, Bifidobacterium longum DJO10A
MECSKSKGANWRAGMWTEVTMLLKAVFWDLDGTLIDSEPLWHDGEIEIAHNNGGEWNEDLGWECSGTPVPHVAEVMIAHGCTLSVPEIDKQLKDYVFKAEVERLPWIPGVQDVLHSLKEADIPSMLVTTSPRRMAENIMKQADGLLAGYVCGDDPYEHKPSPAPYLAAAERLGIAPEDMVKCVVMEDSSSGLRSGAASGATLIAQTGWIRTDTSGLGQFASIDSYEGIDAAALDAFVRQRLGE

SEQ ID NO: 516 - protein, 491 aa, Nelumbo lutea
  unsure (1)..(491): unsure at all Xaa locations
SGPGVSALEEKNLGRIAQIIGPVLDVAFPPGKMPNIYNALVIKGRDTAGQQINVTCEVQQLLGNNRVRAVAMSATDGLMRGMEVIDTGAPLSVPVGGATLGRIFNVLGEPVDNLGPVDTLTTSPIHKSAPAFIQLDTKLSIFETGIKVVDLLAPYRRGGKIGLFGGAGVGKTVLIMELINNIAKAHGGVSVFGGVGERTREGNDLYMEMKESGVINEQNIAESKVALVYGQMNEPPGARMRVGLTALTMAEYFRDVNEQDVLLFIDNIFRFVQAGSEVSALLGRMPSAVGYQPTLSTEMGSLQERITSTKEGSITSIQAVYVPADDLTDPAPATTFAHLDATTVLSRGLAAKGIYPAVDPLDSTSTMLQPRIVGEEHYETAQRVKQTLQRYKELQDIIAILGLDELSEEDRLTVARARKIERFLSQPFFVAEVFTGSPGKYVGLTXTIRGFQLILSGELDGLPEQAFYLVGNIDEATAKAMNLEVXSKXKK

SEQ ID NO: 517 - protein, 489 aa, Garrya elliptica
GSGVSTLEKKNLGRFAQIIGPVLDVAFPPGKMPNIYNALVVKGRDIAGQPINVTCEVQQLLGNNRVRAVAMSATDGLTRGMEVIDTGAPLSVPVGGSTLGRIFNVLGEPVDNLGPVDTRITSPIHRSAPAFIQLDTKLAIFETGIKVVDLLAPYRRGGKIGLFGGAGVGKTVLIMELINNIAKAHGGVSVFGGVGERTREGNDLYMEMKESGVINEQNIAESKVALVYGQMNEPPGARMRVGLTALTMAEYFRDVNEQDVLLFIDNIFRFVQAGSEVSALLGRMPSAVGYQPTLSTEMGSLQERITSTKEGSITSIQAVYVPADDLTDPAPATTFAHLDATTVLSRGLAAKGIYPAVDPLDSTSTMLQPRIVGEEHYETAQRVKQTLQRYKELQDIIAILGLDELSEEDRLTVARARKIERFLSQPFFVAEVFTGSPGKYVGLAETIRGFQLILSGELDSLPEQAFYLVGNIDEATAKAMNLEAESHLQ

SEQ ID NO: 518 - protein, 757 aa, Avena strigosa
MWRLTIGEGGGPWLKSNNGFLGRQVWEYDADAGTPEERAEVERVRAEFTKNRFQRKESQDLLLRLQYAKDNPLPANIPTEAKLEKSTEVTHETIYESLMRALHQYSSLQADDGHWPGDYSGILFIMPIIIFSLYVTRSLDTFLSPEHRHEICRYIYNQQNEDGGWGKMVLGPSTMFGSCMNYATLMILGEKRNGDHKDALEKGRSWILSHGTATAIPQWGKIWLSIIGVYEWSGNNPIIPELWLVPHFLPIHPGRFWCFTRLIYMSMAYLYGKKFVGPISPTILALRQDLYSIPYCNINWDKARDYCAKEDLHYPRSRAQDLISGCLTKIVEPILNWWPANKLRDRALTNLMEHIHYDDESTKYVGICPINKALNMICCWVENPNSPEFQQHLPRFHDYLWMAEDGMKAQVYDGCHSWELAFIIHAYCSTDLTSEFIPTLKKAHEFMKNSQVLFNHPNHESYYRHRSKGSWTLSSVDNGWSVSDCTAEAVKALLLLSKISADLVGDPIKQDRLYDAIDCILSFMNTDGTFSTYECKRTFAWLEVLNPSESFRNIVVDYPSVECTSSVVDALILFKETNPRYRRAEIDKCIEEAVVFIENSQNKDGSWYGSWGICFAYGCMFAVRALVATGKTYDNCASIRKSCKFVLSKQQTTGGWGEDYLSSDNGEYIDSGRPNAVTTSWAMLALIYAGQVERDPVPLYNAARQLMNMQLETGDFPQQEHMGCFNSSLNFNYANYRNLYPIMALGELRRRLLAIKS

SEQ ID NO: 519 - protein, 485 aa, Hymenanthera alpina
  unsure (1)..(485): unsure at all Xaa locations
GSGVSTAAKQKLGRIAQIIGPVLDVAFPPGKMPNIYNALVVKGRDTIGQQINVTCEVQQLLGNNRVRTVAMSATDGLMRGMEVIDTGAPLSVPVGGATLGRIFNVLGEPVDNLGPVDTRTTSPIHRSAPAFVQLETKLLIFETGIKVVDLLAPYRRGGKIGLFGGAGVGKTVLIMELINNIAKAHGGVSVFGGVGERTREGNDLYMEMKESGVINEENLAESKVALVYGQMNEPPGARMRVGLTALTMAEYFRDVNEQDVLLFIDNIFRFVQAGSEVSALLGRMPSAVGYQPTLSTEMGSLQERITSTKEGSITSIQAVYVPADDLTDPAPATTFAHLDATTVLSRGLAAKGIYPAVDPLDSTSTMLQPQIVGEEHYEIAQRVKQTLQRYKELQDIIAILGLDELSEEDRLTVARARKIERFLSQPFFVAEVFTGSPGKYVGLAETIRGFQLILSGELDSLPEQAFYLVGNIDEATAKXTNLEME

SEQ ID NO: 520 - protein, 498 aa, Mycoplasma penetrans
MKMIKKTKITATLGPSITGKIFTLADFNKPENKGVIETAKKNLAALFDAGVNVVRFNFSHGDYEEQTIRLNLVREVAKEKGVNISTMLDTKGPEIRVYKTSEKEVEIKSDSKVRIYTTKKEIGTSEKFSVLDSTGTYNMAKDVQPGNTIFVDDGKLKLEVISSNVEEGIIETIARNTWILRENKRINLPDSNYSIPFMSDKDRNDIIFAIKNKFDYIAASFVNTGDNVREIKKILKEHGGEHIQIISKIETMTGIKSLDDIIDESDSIMVARGDLGLEVPYYDVPTYEKYIIKDCRHKGKTVIVATQMLDSLETKIQPTRAEVTDVFFAVERGTDCTMLSGETANGMYPINAVEVMAKIDVSSENFFDYGRAIDVYFKETPFMKEKVGTLATTIATLVAPKRVIDNHGFDYSSIVVFGNDTRLIQALSNIRCAAPIFFVTDKKEYATRFGLNYGVFVKVVDNVEHAIANKTEIIDAINSQLPEVKKTVVVINDSIYKH

SEQ ID NO: 521 - protein, 585 aa, Desulfurococcus sp. SY
MGRIIRVTGPLVVADGMKGSKMYEVVRVGEMGLIGEIIRLEGDKAVIQVYEETAGIRPGEPVEGTGSSLSVELGPGLLTSMYDGIQRPLEKLRELSGDFIARGLTAPALPRDKKWHFTPTVKVGDKVTGGDILGVVPETSIIEHKILVPPWVEGEIVEIAEEGDYTVEEVIAKVKKPDGSIEELKMYHKWPVRVKRPYKNKLPPEVPLITGQRTIDTFFSIAKGGTAAIPGPFGSGKTVTQHQLAKWSDAQVVVYIGCGERGNEMTDVLEEFPKLKDPKTGKPLMERTVLIANTSNMPVAAREASIYTGITIAEYFRDQGYDVALMADSTSRWAEALREISGRLEEMPGEEGYPAYLASKIAEFYERAGRVVTLGSEPRVGSVSVIGAVSPPGGDFSEPVVQNTLRVVKVFWALDADLARRRHFPAINWLRSYSLYLDSIQDWWHKNVDPEWRKMRDTAMALLQKEAELQEIVRIVGPDALPDREKAILIVTRMLREDYLQQDAFDEVDTYCPPKKQVTMMRVILNFYERTMEAVDRGVPVDEIAKLPVREKIGRMKFEPDIEKIRALIDETNEQFEELFKKYGA

SEQ ID NO: 522 - protein, 476 aa, Cyanidium caldarium
MSTIAQNKGYISQIIGPVIDIEFPNGTLPKIYNAISIKHKNKTITCEVQQLLGDNRVRTVAMNSTEGLQRGIEAIDTGSAITVPVGKCTLGRIFNVLGEPVDELGAISTDRKLPIHRASPLFTQLETKPSIFETGIKVIDLLAPYKRGGKIGLFGGAGVGKTVLIMELINNIAKSHGGVSVFGGVGERTREGNDLYVEMKESKVINEKNLEESKVALVYGQMNEPPGARMRVGLTALTMAEYFRDNNKQDVLLFIDNIFRFVQAGSEVSALLGRMPSAVGYQPTLATEMGALQERITSTKEGSITSIQAVYVPADDLTDPAPATTFAHLDATTVLSRGLASKGIYPAVDPLDSTSTMLQPQIVGDEHYVTAQRVKENLQRYKELQDIIAILGLDELSEEDRLTVARARKIERFLSQPFFVAEVFTGSPGKYVSLKESIDGFKMILNGELDDLPEQAFYLVGNIQEAIKKADELKDK

SEQ ID NO: 523 - protein, 406 aa, Thermotoga maritima
MAGKFCSFCGRDIQQVERLIAGPNNVYICNECIDLFHDLLRSDRKVRIKNEIKEIPTPAEIKAELDKYIIGQERAKKVLSVAVYNHYKRVFSNLDSNDVEIEKSNVLLIGPTGTGKTYLARILAKILNVPFAIADATPLTEAGYVGEDVENVVLRLLEAANFDVERAQYGIIYIDEIDKIAKKSPNPSITRDVSGEGVQQALLKILEGTIANVPPQGGRKHPYQEFIKVDTRNILFIAGGAFDGLEEIIKRRIQSTTMGFGAEIKSKKEMRLGEILKHVTPDDLVQYGLIPEFVGRFPVIATLDDLSEDDLVRILKEPKNAVVRQYQKLFEIDGVKLEVTDEALRIIARKALKRGTGARALKNVFEEMMIDMMFELPNLKNVEKVVITEEVALGKEKPIVVMRESA

SEQ ID NO: 524 - protein, 223 aa, Bifidobacterium longum NCC2705
MLLKAVFWDLDGTLIDSEPLWHDGEIEIAHNNGGEWNEDLGWECSGTPVPHVAEVMIAHGCTLSVPEIDKQLKDYVFKAEVERLPWIPGVQDVLHSLKEADIPSMLVTTSPRRMAENIMKQADGLLAGYVCGDDPYEHKPSPAPYLAAAERLGIAPEDMVKCVVMEDSSSGLRSGAASGATLIAQTGWIRTDTSGLGQFASIDSYEGIDAAALDAFVRQRLGE

SEQ ID NO: 525 - protein, 375 aa, Triticum aestivum
  unsure (1)..(375): unsure at all Xaa locations
MGWLSCCKRSNGAQPGRKKKKDTTWRIFSLKELQLATNNFNYDNKLGEGGFGSVYWGQLWDGSQIAVKRLKSWSNKAEKESAVEVEVLARVRHKSLLXSLRGYCAEXGQERLIVYDYMQNLSLHSHLHGQHAAECHLGWERRMNIAIDSAEGIAYLHHHAIPHIIHRDVKASNVLLDANFQARVADFGFAKLIPDGATHVTTKVKGTLGYLAPEYAMLGKAKESCDVYSFGVLLLELASGKKPVEKINPTTKLTITEWALPLAREQKFKEMADPKLGDSFVEAEVKRMVLVGLACTQTKPEQRPVMSEVVEMLKGESAEKFSILENDDLFKPQPTSSVQGTSGPCSSDAITEEKESKEDTIEEATDSSETVPSAR

SEQ ID NO: 526 - protein, 438 aa, Pseudomonas fluorescens PfO-1
MLQAYRIWIERMTDTRNGEDNGKLLYCSFCGKSQHEVRKLIAGPSVFICDECVDLCNDIIREEVQEAQAESSAHKLPSPKEISGILDQYVIGQERAKKVLAVAVYNHYKRLNQRDKKADDVELGKSNILLIGPTGSGKTLLAETLARLLNVPFTIADATTLTEAGYVGEDVENIIQKLLQKCDYDVEKAQMGIVYIDEIDKISRKSDNPSITRDVSGEGVQQALLKLIEGTVASVPPQGGRKHPQQEFLQVDTRNILFICGGAFSGLEKVIQNRSTKGGIGFNAEVRSKEEGKKVGESLREVEPDDLVKFGLIPEFVGRLPVLATLDELDEAALMQILTEPKNALTKQYAKLFEMEGVDLEFRSDALKSVAKRALERKTGARGLRSILEGVLLDTMYEIPSQSEVSKVVIDESVIEGKSKPLYIYENSEPAAKAAPDA

SEQ ID NO: 527 - protein, 476 aa, Streptomyces coelicolor A3(2)
MRRSKIVCTLGPAVDSHEQLVTLIEAGMNVARFNFSHGTHAEHQGRYDRVRAAAKETGRAIGVLADLQGPKIRLETFAEGPVELVRGDEFTITAEDVPGDRTICGTTYKGLPGDVTKGDQVLINDGNVELKVTEVEGPRVKTIVIEGGVISDHKGINLPGAAVNVPALSEKDVEDLRFALRMGCDLVALSFVRDAKDVADVHRVMDEEGRRVPVIAKVEKPQAVDNMEDVVMAFDGVMVARGDLAVEYPLEKVPMVQKRLIELCRRNAKPVIVATQMMESMITNSRPTRAEASDVANAILDGADAVMLSAESSVGAYPIETVKTMSKIVTAAEQELLSKGLQPLVPGKKPRTQGGSVARAAAEIADFLGGKGLVAFTQSGDTARRLSRYRAAQPILAFTTDESTRNQLALSWGVEPHVVPFVNTTDEMVDLVDQETARLGRFSDGDTVVITAGSPPGVSGTTNMVRVLHLGETRRG

SEQ ID NO: 528 - protein, 456 aa, Muntingia calabura
IGPVLDVAFTSGKMPNIYNALVVKGRDTIGQQINVTCEVQQLLGNNRVRAVAMSATDGLMRGMEVIDTGAPLSVPVGGATLGRIFNVLGEPVDNLGSVDTRTTAPIHKPAPAFIQLDTKLSIFETGIKVVDLLAPYRRGGKIGLFGGAGVGKTVLIMELINNIAKAHGGVSVFGGVGERTREGNDLYMEMKESGVINEKNLAESKVALVYGQMNEPPGARMRVGLTALTMAEYFRDVNEQDVLLFIDNIFRFVQAGSEVSALLGRMPSAVGYQPTLSTEMGTLQERITSTKKGSITSIQAVYVPADDLTDPAPATTFAHLDATTVLSRGLAAKGIYPAVDPLDSTSTMLQPRIVGEEHYETAQRVKQTLQRYKELQDIIAILGLDELSEEDRLTVARARKIERFLSQPFFVAEVFTGSPGKYVGLAETIRGFKLILSGELDSLPEQAFYLVGNIDE

SEQ ID NO: 529 - protein, 585 aa, Staphylococcus aureus subsp. aureus Mu50
MRKTKIVCTIGPASESEEMIEKLINAGMNVARLNFSHGSHEEHKGRIDTIRKVAKRLDKIVAILLDTKGPEIRTHNMKDGIIELERGNEVIVSMNEVEGTPEKFSVTYENLINDVQVGSYILLDDGLIELQVKDIDHAKKEVKCDILNSGELKNKKGVNLPGVRVSLPGITEKDAEDIRFGIKENVDFIAASFVRRPSDVLEIREILEEQKANISVFPKIENQEGIDNIAEILEVSDGLMVARGDMGVEIPPEKVPMVQKDLIRQCNKLGKPVITATQMLDSMQRNPRATRAEASDVANAIYDGTDAVMLSGETAAGLYPEEAVKTMRNIAVSAEAAQDYKKLLSDRTKLVETSLVNAIGISVAHTALNLNVKAIVAATESGSTARTISKYRPHSDIIAVTPSEETARQCSIVWGVQPVVKKGRKSTDALLNNAVATAVETGRVSNGDLIIITAGVPTGETGTTNMMKIHLVGDEIANGQGIGRGSVVGTTLVAETVKDLEGKDLSDKVIVTNSIDETFVPYVEKALGLITEENGITSPSAIVGLEKGIPTVVGVEKAVKNISNNMLVTIDAAQGKIFEGYANVL

SEQ ID NO: 530 - protein, 269 aa, Klebsiella aerogenes
MERYETLFAQLKNRQEGAFVPFVTLGDPGPEQSLKIIDALIEGGADALELGIPFSDPLADGPTIQGAALRAFAAGVTPAQCFEMLAAIRQKHPTIPIGLLMYANLVFSPGIDAFYAQCARVGVDSVLVADVPVEESAPFRQAAMRHNIAPIFICPPNADDDLLRQIASYGRGYTYLLSRAGVTGAENRAALPLHHLVEKLAEYHAAPPLQGFGISAPEQVSAAIDAGAAGAISGSAIVKIIERHLDEPQTMLDELKAFVQSLKAATKTA

SEQ ID NO: 531 - protein, 366 aa, Triticum aestivum
  unsure (1)..(366): unsure at all Xaa locations
PPKLLSQQLVLLLIEQRLVRCCCENTAMLGERKNVNLPGVVVDLPTLTEKDKEDILQWGVPNKIDMIALSFVRKGSDLVEVRKVLGEHAKSIMLMSKVENQEGVANFDDILAQSDAFMVARGDLGMEIPVEKIFYAQKVMIFKCNIQGKPVVTATQMLESMIKSPRPTRAEATDVANAVLDGTDCVMLSGETAAGAYPELAVQTMAKICLQAESCVDYSAVFKSIMSSAPIPMSPLESLASSAVRTANSAKATLILVLTRGGTTARLVAKYRPSMPILSVVVPELKTVEFDWICSDEGPARQSLIVRGVIPMLSAGTAKAFDSEATEEALRFAMKNAKEMGPCNXGDSIVALHRIGNASVIKLLTV

SEQ ID NO: 532 - protein, 271 aa, Buchnera aphidicola str. Sg (Schizaphis graminum)
MSRYKKMFQKLSFLKEGCFVPFVVIGDPSLEMSLKIIETLIENGADALELGIPFSDPLADGPIIQKASLRALYKKNTFLQCFELIENIRNKYLHLPIGILLYANLVYNYGIKNFYYQCFRSGLDSVLIADIPIEEYEPFYKIANQYNINSIFICPPDADDSLLSKISLYAKGYIYLLSRPGVTGIEKKTISLSNIFIEKIKKYNSLPLLQGFGIENPTQIQKSILSGTNGVICGSAIIDIIEKNLNKEKKMINEIKNFTSKLKKATKFVQS

SEQ ID NO: 533 - protein, 492 aa, Betula pendula
  unsure (1)..(492): unsure at all Xaa locations
FNPTTXXSGVSALEKKXXGXIVQIIGPVLDVAFPPGKMPNIYNALVVXGRDTAGQXINVTCEVQQLLGNXRVRAVAMSATDGLTRGMEVIDTGASLSVPVGGATLGRIFNVLGEPVDNLGPVDTRTTSPIHRSAPAFIQLDTKLSIFETGIKVVDLLAPYRRGGKIGLFGGAGVGKTVLIMELINNIAKAHGGVSVFGGVGERTREGNDLYMEMKESGVINEQNIAESKVALVYGQMNEPPGARMRVGLTALTMAEYFRDVNEQDVLLFIDNIFRFVQAGSEVSALLGRMPSAVGYQPTLSTEMGSLQERITSTKSGSITSIQAVYVPADDLTDPAPATTFAHLDATTVLSRGLAAKGIYPAVDPLDSTSTMLQPRIVGEEHYETAQRVKQTLQRYKELQDIIAILGLDELSEEDRLTVARARKIERFLSQPFFVAEVFTGSPGKYVGLAETIRGFKLILSGELDGLPEQAFYLVGNIDEATAKAXNLEMES

SEQ ID NO: 534 - protein, 411 aa, Cytophaga hutchinsonii
MAQQTCSFCERPKKDVLLMITGIHANMCDKCITQSYQILQEELKQKGKSEGAPKFNLIKPAKMKSHLDQYVIGQDEAKKVMSVAVYNHYKRLMQSKINEDDDVQIEKSNIIMVGETGTGKTYLARTLAKILQVPFCIADATVLTEAGYVGEDVESILTRLLQAANYDVDAAQRGIVYIDEIDKIARKSDNPSITRDVSGEGVQQALLKLLEGSIVNVPPQGGRKHPDQKMIAINTENILFICGGAFDGIARIIANRLNTQPIGFKTKDDEDDIDAENLLQYVTALDLKTFGLIPELIGRLPLVSYLDPLNEEMLLEILTQPKNAIVKQYKKLFDMEGISLTFEPEALQFIVEKAMAFKLGARGLRSICEAIMTDAMFDLPSEEIKQASFVINYEYAKEKLDRSKFRKLKAA

SEQ ID NO: 535 - protein, 243 aa, Cyanidioschyzon merolae
MLIAYLTAGAPDINTTKEAVMKLAKKGADVIEIGVPYSDPLADGAILQKASKQALMNGFHLDHLWNLLSEVNEIEVPLVILAYYNQIWHYGVEKWVKKLVAHYVKGLIVPDLPYEESKTLRQICDRYGLNIIWLISPTTNKTRAQELARACKDWIYVISRTGVTGLETEFDKQIPKLIGELKKVTKAPIALGFGISKSEQVKLVKSWGADGVIIGSACMQILLEKGVDQLSEWISVMKKSFCP

SEQ ID NO: 536 - protein, 478 aa, Brexia madagascariensis
  unsure (1)..(478): unsure at all Xaa locations
XXLEKKNLGRFVQIIGPVLDVAFPPGKMPNIYNALVVKGRDTSGQPINVICEVQQLLGNNQVRAVAMSATDGLMRGMDVIDTGAPLSVPVGGATLGRIFNVLGEPVDNLGPVDTRTTSPIHKSAPAFIQLETKLSIFETGIKVVDLLAPYRRGGKIGLFGGAGVGKTVLIMELINNIAKAHGGVSVFGGVGERTREGNDLYMEMKESGVINEQNIAESKVALVYGQMNEPPGARMRVGLTALTMAEYFRDVNEQDVLLFIDNIFRFVQAGSEVSALLGRMPSAVGYQPTLSTEMGSLQERITSTKKGSITSIQAVYVPADDLTDPAPATTFAHLDATTVLSRGLAAKGIYPAVDPLDSTSTMLQPRIVGEEHYETAQRVKQTLQRYKELQDIIAILGLDELSEEDRLTVARARKIERFLSQPFFVAEVFTGSPGKYVGLAETIRGFKLILSGELDGFPEQAFYLVGNIDEATTKATNL

SEQ ID NO: 537 - protein, 585 aa, Desulfurococcus mobilis
  unsure (1)..(585): unsure at all Xaa locations
MGRIIRVTGPLVVADGXKGSKMYEVVRVGEMGLIGEIIRLEGDKAVIQVYEETAGIRPGEPVEGTGSSLSVELGPGLLTSMYDGIQRPLEKLRELSGDFIARGLTAPALPRDKKWHFTPTVKVGDKVTGGDILGVVPETSIIEHKILVPPWVEGEIVEIAEEGDYTVEEVIAKVKKPDGSIEELKMYHKWPVRVKRPYKNKLPPEVPLITGQRTIDTFFSIAKGGTAAIPGPFGSGKTVTQHQLAKWSDAQVVVYIGCGERGNEMTDVLEEFPKLKDPKTGKPLMERTVLIANTSNMPVAAREASIYTGITIAEYFRDQGYDVALMADSTSRWAEALREISGRLEEMPGEEGYPAYLASKIAEFYERAGRVVTLGSEPRVGSVSVIGAVSPPGGDFSEPVVQNTLRVVKVFWALDADLARRRHFPAINWLRSYSLYLDSIQDWWHKNVDPEWRKMRDTAMALLQKEAELQEIVRIVGPDALPDREKAILIVTRMLREDYLQQDAFDEVDTYCPPKKQVTMMRVILNFYERTMEAVDRGVPVDEIAKLPVREKIGRMKFEPDIEKIRALIDETNEQFEELFKKYGA

SEQ ID NO: 538 - protein, 595 aa, Sulfolobus tokodaii
MSNMVSEGRVVRVNGPLVIADGMREAQMFEVVYVSDLKLVGEITRIEGDRAFIQVYESTDGVKPGDKVYRSGAPLSVELGPGLIGKIYDGLQRPLDSIAKVSNSPFVARGVSIPALDRQTKWHFVPKVKSGDKVGPGDIIGVVQETDLIEHRILIPPNVHGTLKELAREGDYTVEDVVAVVDMNGDEIPVKMYQKWPVRIPRPYKEKLEPVEPLLTGIRVLDTVFPIAKGGTAAIPGPFGSGKTVTLQSLAKWSAAKVVIYVGCGERGNEMTDELRSFPKLKDPWTGKPLLLRTILVANTSNMPVAARESSIYVGVTMAEYFRDQGYDVLLVADSTSRWAEALRDLGGRMEEMPAEEGFPSYLPSRLAEYYERAGRVIALGNPERYGSVTIASAVSPPGGDFTEPVTSNTLRFVRVFWPLDVSLAQARHYPAINWIQGFSAYVDLVAQWWHKNVDPNWKEMRDTMMKVLIREDELRQIVRLVGPESLAEKDKLVLEAAKLIKDAFLKQNAYDDIDAFSSPQKQVRIMRLIYIFYNQSQDLISKGVPLKKILDKVGPIEPEIIRIKYTIKNDELNKIDEIENKLKATFDSLLKEVS

SEQ ID NO: 539 - protein, 222 aa, Thermobifida fusca
MTVEQQLPQAVLFDMDGTLIDTEPLWIATEAEVAAELGCTTWTVEDQRRCLGSSAAMVASYIAERSGTSVPQSEIVTMLYTSVARRMADSPPVQPGAKELLSELDALGVPMALVTSTYRSLLGTALRGLGEHYFAATVAGDEVSQAKPHPEPYLTAARLLGVDPRRCVAVEDSPAGVAAAQAAGCVVVAVPHVAPIEEAERRYVVSSLTEISVDWLRQVVNS

SEQ ID NO: 540 - protein, 508 aa, Xanthomonas campestris pv. campestris str. ATCC 33913
MPSSVRDACVKFRGFYREAIMKERQRRTKILATLGPATDPPGVLDALFKAGVNVVRLNFSHGDPSGQAKRAAEVRAAAVRVGAEVGILADLPGPKIRIERFAGGKIKLTMGDRFDLVADINAPAGDQHQVGVSYLGLPQDVTAGDVLLLDDGLVQLQVTDVQGARIVTTVLNDGVLSDRKGLNKQGGGLSLGALTERDKELIGIVAKIGVDFIAVSFCRNAQDMHDARQIAQQHGCDAQLVSKIERTEAIENLVEIVEASDVVMVARGDLGVEIGDAELPGLQKKIIRESLAQNKVVITATQMLQSMVESPIPTRAEVLDVANAVIDGTDAVMLSAETAAGAYPVRAVEAMARICLGAEHQFEFDTDFEAAQRNLQRADQAIAMATMFLSEHIGLGGVVALTESGGTPRYLSRFRSNMPIYAFTRHDGARRQMAMMRGVFPIGFDSRGLTPREAARAAIRLLVENERMGPGDRVVFTSGEHMETHGATNTLRLLEVGEDGRASGLGEL

SEQ ID NO: 541 - protein, 275 aa, Caulobacter crescentus CB15
MTKDRIDRRFAALKAENRAGFVTYVMAGDPDAATTLSVLKGLPAAGADLIELGFPFSDPMAEGPTIQRAAQRGLKSGMTLQGTLDLVAAFREGDQDTPIILMGYLNPVLNKGFETFAALAAKAGVDGLIIVDCPPEEADPLSDALEAEGIALIRLAAPTTDDARLPMVVRRTSGFVYYVSVAGVTGVKSADAADVAPAVERLRKASGLPVAVGFGIRTPDQAAAVAKVADAAVVGSALVDEIESAAQLNENVTEKVLLKASELAKAVRSARVGTK

SEQ ID NO: 542 - protein, 497 aa, Leersia oryzoides
  unsure (1)..(497): unsure at all Xaa locations
MRTNPTTSRPGVSTIEEKSTGRIDQIIGPVLDVTFPPGKLPYIYNALVVKSRDTDGKQINVTCEVQQLLGNNRVRAVAMSATDGLMRGMEVIDTGAPLSVPVGGATLGRIFNVLGEPVDNLGPVDTSATFPIHRSAPAFIELDTKLSIFETGIKVVDLLAPYRRGGKIGLFGGAGVGKTVLIMELINNIAKAHGGVSVFGGVGERTREGNDLYMEMKESGVINEKNLEESKVALVYGQMNEPPGARMRVGLTALTMAEYFRDVNKQDVLLFIDNIFRFVQAGSEVSALLGRMPSAVGYQPTLSTEMGSLQERITSTKXGSITSIQAVYVPADDLTDPAPATTFAHLDATTVLSRGLAAKGIYPAVDPLDSTSTMLQPRIVGEEHYETAQRVKQTLQRYKELQDIIAILGLDELSEEDRLTVARARKIERFLSQPFFVAEVFTGSPGKYVGLAETIRGFXLILSGELDGLPEQAFYLVGNIDEXTAKAXNLEMESNLK

SEQ ID NO: 543 - protein, 487 aa, Cortusa turkestanica
MRINPTTSGPGTSVLEKKNLGRIIQIIGPVLDVSFPPGKMPNIYNALVVKGRDTAGQPINVTCEVQQLLGNNRVRAVAMSATDGLTRRMEVIDTGAALSVPVGGATLGRIFNVLGEPVDNLGPVDTRTTSPIHRSAPAFIQLDTKLSIFETGIKVVDLLAPYRRGGKIGLFGGAGVGKTVLIMELINNIAKAHGGVSVFGGVGERTREGNDLHMEMKESGVINEENIAESKVALVYGQMNEPPGARMRVGLTALTMAEYFRDVNEQDVLLFIDNIFRFVQAGSEVSALLGRMPSAVGYQPTLSTEMGSLQERITSTKEGSITSIQAVYVPADDLTDPAPATTFAHLDATTVLSRGLASKGIYPAVDPLDSTSTMLQPRIVGEEHYETAQRVKETLQRYKELQDIIAILGLDELSEEDRLTVARARKIERFLSQPFFVAEVFTGSPGKYVALAETIRGFQLILSGELDGLPEQAFYLVGNIDEATSKA

SEQ ID NO: 544 - protein, 423 aa, Fusobacterium nucleatum subsp. nucleatum ATCC 25586
MSKKMDRCSFCGRTEREVTQLFQGPGDVFICDSCVESCHSLLRDDMYSLAREYENLRDGKSSNNKNYKGKIELLKPVEIKAKLDEYVVGQDEAKKVLSVAVYNHYKRILNNGQDDDGVELQKSNVLLVGPTGSGKTLLAQTLAKILNVPFAIADATTLTEAGYVGDDVENVLVRLIQACNYDIPNAERGIIYIDEFDKIARKSENVSITRDVSGEGVQQALLKIIEGTKSQVPPEGGRKHPNQELIEIDTKNILFIVGGAFEGLEKIIKARTNKKVIGFGAEVQKQDNMGTEGEFFKKVLPEDLMKQGIIPELVGRLPVITTLDNLDEQTLINILTKPKNAIVKQYQKLCKLEGVKLEFTQEALTEIAKRALKRKMGARGLRAIIEHTMLDIMFELPSNNNIKEITITKDTIDNYKKAEIEYK

SEQ ID NO: 545 - protein, 467 aa, Sambucus nigra
  unsure (1)..(467): unsure at all Xaa locations
GRIIQIIGPVLDVAFPPGKMPNIYNALVVXGRDTAGQPINVTCEVQQLLGNHRVRAVAMSATDGLTRGMEVIDTGAALSVPVGGATLGRIFNVLGEPVDNLGPVDTRTTSPIHRSAPAFIQLDTKLSIFETGIKVVDLLAPYRRGGKIGLFGGAGVGKTVLIMELINNIAKAHGGVSVFGGVGERTREGNDLYMEMKESGVINEQNIEESKVALVYGQMNEPPGARMRVGLTALTMAEYFRDVNEQDVLLFIDNIFRFVQAGSEVSALLGRMPSAVGYQPTLSTEMGTLQERITSTKEGSITSIQAVYVPADDLTDPAPATTFAHLDATTVLSRGLAAKGIYPAVDPLDSTSTMLQPRIVGEEHYDTAQMVKQTLQRYKELQDIIAILGLDELSEEDRLTVARARKIERFLSQPFFVAEVFTGSPGKYVGLAETIRGFQLILSGELDGLPEQAFYLVGNIDEATAXA

SEQ ID NO: 546 - protein, 470 aa, Phyllachne uliginosa
PVLDVAFSPGKMPNIYNALVVKGRDTAGEPINVTCEVQQLLGNNRVRAVAMSATDGLTRGMEVIDTEAPLSVPVGGATLGRIFNVLGEPVDNLGPVDTRTTSPIHRSAPAFIQLDTKLSIFETGIKVVDLLAPYRRGGKIGLFGGAGVGKTVLIMELINNIAKAHGGVSVFGGVGERTREGNDLYMEMKESGVINEENIAESKVALVYGQMNEPPGARMRVGLTALTMAEYFRDVNEQDVLLFIDNIFRFVQAGSEVSALLGRMPSAVGYQPTLSTEMGTLQERITSTKEGSITSIQAVYVPADDLTDPAPATTFAHLDATTVLSRGLAAKGIYPAVDPLDSTSTMLQPRIVGEEHYEIAQRVKQTLQRYKELQDIIAILGLDELSEEDRLTVARARKIERFLSQPFFVAEVFTGSPGKYVGLAETIKGFQLILSGELDGLPEQAFYLVGNIDEATAKAMNLEMESSLKK

SEQ ID NO: 547 - protein, 278 aa, Bradyrhizobium japonicum USDA 110
MTTRIDIRFAELAKQGRSAFVTFLMAGDPDPATSLEIIKALPKSGADVIEIGMPFTDPMADGPSIQAAGLRALKAGMTLKKTLELVRGFRKDDNATPIVLMGYYNPIYIYGVDKFLVDAKSAGVDGLIIVDLPPEEDDELCLPAMKAGLNFIRLATPTTDDKRLPAVLANTSGFVYYVSITGITGAAAADSSAVSEAVARIKRHTKLPVCVGFGIRTPETARAIASHANGAVVGTALVDALKNSLDADGRATAKTVNAVAELTASLAQGVKGAQQAAE

SEQ ID NO: 548 - protein, 362 aa, Nostoc sp. PCC 7120
MLNLSQNGCSVWVASSTEMVLTPTAVALGKFDGVHLGHQRVIQPVLQSTRSAQTWGDALDSSAQSANPPAAPQERIYSTVVTFRPHPQEFFTGQARTWLTPLDEKVQQLRSLGVDQLVLLPFDKELTALSPEEFVEKILVQQLRCQRISVGQDFCFGKQRRGTAKDLQLIAAKYHIPVSIVPLQTSDGQFLEDGNCGSFESLEDAPISTSLIRQALETGDIKTANRFLGRPYILIGVVVEGEQLGRTIGFPTANLELPKDKFVPRQGVYAVRVKILGESADANIPLEILGVMNIGNRPTVNGTYSSVEVYLLDWSGDLYGKELAVQLVDFLRPEQKFPSLEALKAQIQQDCTVARQILSREN

SEQ ID NO: 549 - protein, 349 aa, Burkholderia fungorum
MTEAAAIDANALCSDGRDAAALQDSQDSRAQAPQVDLAALYRDSGIGDVLAELDRDLVGLAPVKTRIREIAAHLLVERARDSLGLAGGAPTLHMCFSGNPGTGKTTVALRMAEVLHRLGYIRRNHLVSVTRDDLVGQYIGHTAPKTRDVLKRAMGGVLFIDEAYYLYRPENERDYGQEAIEILLQTMENQRDDLVVILAGYAARMEVFFESNPGFRSRIAHHITFPDYDGAELLDIAERMLATMHYRFDADSRRAFADYLALRTRQANFANARSVRNALDRSRLRQANRLFATAMQGGAPIDAAALTLIAAADVRASRVFTESEALAANAGAPASSHATATRAVTAPPG

SEQ ID NO: 550 - protein, 487 aa, Jacquinia keyensis
MKINPTTSGPGASVLEKKNLGRIIQIIGPVLDVAFPPGKMPNIYNALVVKGRDTAGQPINVTCEVQQLLGNNRVRAVAMSATDGLTRGMEVIDTGAALSVPVGGATLGRIFNVLGEPIDNLGPVDTRTTSPIHRSAPAFIQLDTKLSIFETGIKVVDLLAPYRRGGKIGLFGGAGVGKTVLIMELINNIAKAHGGVSVFGGVGERTREGNDLYMEMKESGVINEENIAESKVALVYGQMNEPPGARMRVGLTALTMAEYFRDVNEQDVLLFIDNIFRFVQAGSEVSALLGRMPSAVGYQPTLSTEMGSLQERITSTKEGSITSIQAVYVPADDLTDPAPATTFAHLDATTVLSRGLAAKGIYPAVDPLDSTSTMLQPRIVGEEHYETAQRVKQTLQRYKELQDIIAILGLDELSEEDRLTVARARKIERFLSQPFFVAEVFTGSPGKYVGLAETIRGFQLILSGELDGLPEQAFYLVGNIDEATAKA

SEQ ID NO: 551 - protein, 976 aa, Pisum sativum
MKSITCYLLVFFCVLFTPCFSITDLDALLKLKESMKGEKSKHPDSLGDWKFSASGSAHCSFSGVTCDQDNRVITLNVTQVPLFGRISKEIGVLDKLERLIITMDNLTGELPFEISNLTSLKILNISHNTFSGNFPGNITLRMTKLEVLDAYDNSFTGHLPEEIVSLKELTILCLAGNYFTGTIPESYSEFQKLEILSINANSLSGKIPKSLSKLKTLKELRLGYNNAYDGGVPPEFGSLKSLRYLEVSNCNLTGEIPPSFGNLENLDSLFLQMNNLTGIIPPELSSMKSLMSLDLSNNALSGEIPESFSNLKSLTLLNFFQNKFRGSIPAFIGDLPNLETLQVWENNFSFVLPQNLGSNGKFIFFDVTKNHLTGLIPPDLCKSKKLQTFIVTDNFFHGPIPKGIGACKSLLKIRVANNYLDGPVPQGIFQMPSVTIIELGNNRFNGQLPSEVSGVNLGILTISNNLFTGRIPASMKNLISLQTLWLDANQFVGEIPKEVFDLPVLTKFNISGNNLTGVIPTTVSQCRSLTAVDFSRNMITGEVPRGMKNLKVLSIFNLSHNNISGLIPDEIRFMTSLTTLDLSYNNFTGIVPTGGQFLVFNDRSFFGNPNLCFPHQSSCSSYTFPSSKSHAKVKAIITAIALATAVLLVIATMHMMRKRKLHMAKAWKLTAFQRLDFKAEEVVECLKEENIIGKGGAGIVYRGSMPNGTDVAIKRLVGQGSGRNDYGFKAEIETLGRIRHRNIMRLLGYVSNKDTNLLLYEYMPNGSLGEWLHGAKGCHLSWEMRYKIAVEAGKGLCYLHHDCSPLIIHRDVKSNNILLDADFEAHVADFGLAKFLYDPGASQSMSSIAGSYGYIAPEYAYTLKVDEKSDVYSFGVVLLELIIGRKPVGEFGDGVDIVGWINKTELELYQPSDKALVSAVVDPRLTGYPMASVIYMFNIAMMCVKEMGPARPTMREVVHMLTNPPQSTTHNNLINL

SEQ ID NO: 552 - protein, 243 aa, Staphylococcus epidermidis ATCC 12228
MSKLFIPYIMGDLNFIHHLKTLTENGADIVEIGVPFSDPVADGPIIMKAGRNAIDEGSNIKFIFDELIKNKNTISSKYVLMTYYNILSAYGEELFLDKCDEAGVYGLIIPDLPYELTKKFKKDFYHHSVKIISLIAMTASDARIMQIAKNSEGFIYTVTMNATTGNSGEFHPDLKRKIEYIKKVSKIPVVAGFGIKNPEHVKDIASVADGIVIGSEIVKRIEIDSRKEFITYIKSIRTTLNSL

SEQ ID NO: 553 - protein, 493 aa, PERIBOEA PAUCIFOLIA
INPTTSGSAVSTLEEKNLGRIAQIIGPVLDVVFPLGKMPNIYNALVVKGRDTVGQQINVTCEVQQLLGNNRVRAVAMSATDGLTRGMEVIDTGAALSVPVGGATLGRIFNVLGEPVDNLGPVDTRTTSPIHRSAPAFIQLDTKLSIFETGIKVVDLLAPYRRGGKIGLFGGAGVGKTVLIMELINNIAKAHGGVSVFGGVGERTREGNDLYMEMKESGVINEKNIAESKVALVYGQMNEPPGARMRVGLTALTMAEYFRDVNEQDVLLFIDNIFRFVQAGSEVSALLGRMPSAVGYQPTLSTEMGSLQERITSTKEGSITSIQAVYVPADDLTDPAPATTFAHLDATTVLSRGLAAKGIYPAVDPLDSTSTMLQPRIVGEEHYEIAQRVKQTLQRYKELQDIIAILGLDELSEEDRLTVARARKIERFLSQPFFVAEVFTGSPGKYVGLTETIRGFQLILSGELDSLPEQAFYLVGNIDEATAKAMNLEGEKK

SEQ ID NO: 554 - protein, 267 aa, Pseudomonas aeruginosa
MSRLQTRFAQLKQENRAALVTFVTAGDPDYASSLEILKGLPGAGADVIELGMPFTDPMADGPAIQLANIRALEGGQTLARTLQMVREFRSGDSETPLVLMGYFNPIHHYGVERFIAEAKEVGVDGLIVVDLPPEHNEDLCHPAQAAGLDFIRLTTPTTGDQRLPTVLEGSSGFVYYVSVAGVTGANAATLEHVEEAVARLRRHTDLPIGIGFGIRSAEHAAVARLADGVVVGSALIDRIAKARDNAQAVKDVLALCGELAEGVRNAR

SEQ ID NO: 555 - protein, 479 aa, Nomocharis pardanthina
  unsure (1)..(479): unsure at all Xaa locations
VXXLEKKNXGRIAQIIGPVLDVVFPPGKMPNIYNALVVKGRDTVGPQINVTCEVQQLLGNNRVRAVAMSATDGLMRGMEVIDTGTPLSVPVGGATLGRIFNVLGEPVDNLGPVDTRTTSPIHRSAPAFIQLDTKLSIFETGIKVVDLLAPYRRGGKIGLFGGAGVGKTVLIMELINNIAKAHGGVSVFGGVGERTREGNDLYMEMKESGVINEKNIAESKVALVYGQMNEPPGARMRVGLTALTMAEYFRDVNEQDVLLFIDNIFRFVQAGSEVSALLGRMPSAVGYQPTLSTEMGSLQERITSTKEGSITSIQAVYVPADDLTDPAPAATFAHLDATTVLSRGLAAKGIYPAVDPLDSTSTMLQPRIVGEEHYEIAQRVKQTSQRYKELQDIIAILGLDELSEEDRLTVARARKIERFLSQPFFVAEVFTGSPGKYVALAETIKGFQLILSGELDGLPEQAFYLVGNIDEATAXAMNL

SEQ ID NO: 556 - protein, 450 aa, Rickettsia conorii
MKATKTTYKKDPMGLTPSQIVNELNRFIVGQEKAKKAVAIALRNRCRRKRVEGNLRNEIVPKNILMIGSTGVGKTEIARRLAKLTNSPFYKIEATKFTEVGYVGRDVESIIRDLVEIAVNTEKTLAKTKVDIHAREKAIERILDSLVGKTSSSETREKFKEKILNGELDDKEIEISVADTTPVGGGSFEIPGMPGASMGVLNLGDMIGRALGSSKTKTKKMLVKDAMAIIIPEESEKLIDQEKIIQQAINLAENDGIVFIDEIDKIASTGSSGAKNAEISREGVQRDLLPLIEGTTVNTKYGPVKTDHILFIASGAFHIAKPSDLLPELQGRLPIRVELNSLTKDDMIKILLEPETSLIKQYSALIGTEDVHLEFAASAIEKIADYAITVNLEVEDIGARRLHTILENLLEDISFEASEMKGKKITIDDKFVENQLSKIITNLDLAKFVL

SEQ ID NO: 557 - protein, 331 aa, Mycobacterium tuberculosis H37Rv
MRRRLAIVQRWRGQDEIPTDWGRCVLTIGVFDGVHRGHAELIAHAVKAGRARGVPAVLMTFDPHPMEVVYPGSHPAQLTTLTRRAELVQDLGIEVFLVMPFTTDFMKLTPDRFIHELLVEHLHVVEVVVGENFTFGKKAAGNVDTLRRAGERFGFAVESMSLVSEHHSNETVTFSSTYIRSCVDAGDMVAAMEALGRPHRVEGVVVRGEGRGAELGFPTANVAPPMYSAIPADGVYAAWFTVLGHGPVTGTVVPGERYQAAVSVGTNPTFSGRTRTVEAFVLDTTADLYGQHVALDFVGRIRGQKKFESVRQLVAAMGADTERARDLLSTG

SEQ ID NO: 558 - protein, 470 aa, Vibrio parahaemolyticus RIMD 2210633
MKKTKIVCTIGPKTESVEKLTELVNAGMNVMRLNFSHGDYEEHGTRIANFRKVMEATGKQLAILLDTKGPEIRTIKLEGGNDVDLVAGQEFTFTTDTSVVGNKDKVAVTYAGFAADLNVGNTILVDDGLIEMEVIATTDTEVKCKVLNNGALGENKGVNLPGVSVNLPALSEKDKNDLKFGCEQGVDFVAASFIRKASDVQEIREVLAANGGENIHIISKIENQEGVDNFDEILELSDGIMVARGDLGVEIPAEEVIFAQKMMIEKCNRARKMVITATQMLDSMINNPRPTRAEAGDVANAVMDGTDAVMLSGETAKGKYPVEAVTIMAQIAKRTDSVLKAELGSRLDSPRLRITEAVCKGAVDTAEKLAAPLIVVATEGGKSARSVRKYFPTANILALTTNKKTAAQLVLTKGVTPVVVDAIESTDAFYVAGKELALESGLGNKGDIVVMVSGALVASGTTNTASVHVL

SEQ ID NO: 559 - protein, 235 aa, Photobacterium leiognathi
ASDGIMVARGDLGVEIPVEEVIFAQKMMIEKCNRARKVVITATQMLDSMIKNPRPTRAEAGDVANAIMDGTDAVMLSGESAKGKYPIEAVTIMAQICARTDDVVKPELGSRLDSPRLRITEAVCKGAVDTAEKLNAPLIIVATEAGKSARSVRKYFPTARILAVTTNTKTAAQLCLSKGVTPVVVDSIESTDAFYLRGKELALETGLGAKGDIVVMVSGALVASGTTNTASVHVL

SEQ ID NO: 560 - protein, 585 aa, Bacillus licheniformis
MRKTKIVCTIGPASESVEKLTQLMEAGMNVARLNFSHGDFEEHGARIKNIREAAGKLGKDIGILLDTKGPEIRTHTMENGSIELAAGSQLIVSMDEVIGTPDKISVTYDGLIHDVSVGSTILLDDGLVGLEVTDINKDKREIVTKVMNSGTLKNKKGVNVPGVSVNLPGITEKDANDIVFGIEQGVDFIAASFVRRPSDVLEIRELLEEHNAADIQIIPKIENQEGVDNIDAILEVSDGLMVARGDLGVEIPAEEVPLVQKELIKKCNALGKPVITATQMLDSMQRNPRPTRAEASDVANAIFDGTDAIMLSGETAAGNYPVEAVQTMHNIASRSEEALNHKKILSARSKQVSMSITDAIGQSVAHTAINLDVNAIVTPTESGHTARMISKYRPQAPIVAVTVNDAVSRKLSLVFGVFATSGQNHSSTDEMLEKAVQKSLDTGIVRHGDLIVITAGAVGEAGTTNLMKVYVVGDVVAKGQGIGRKSAFGEVVIAQNAQEAAKKMKDGAVLVTKSTDRDMMASLEKAAALITEEGGLTSHAAVVGLSLGIPVIVGMENATSILKEGEDITVDSARGAVYKGRASVL

SEQ ID NO: 561 - protein, 270 aa, Buchnera aphidicola (Diuraphis noxia)
MNRYENIFDRLSQRKEGCFVPFVVLGDPSLDTSLKIINILIQNGADALELGIPFSDPLADGKTIQKANLRALSQKNNIFQYFKEIKNLRKKHTQIPIGLLIYANLVYNQGLDNFYLKCRKSGVDSVLIADVPIEESEIFYTTANKYKISSIFICPPNADDDLLYRISLYAKGYIYVLSRPGVTGIENQNFFVSGDFIKKIKKYNSVPLLQGFGISNSIQVKQAISSGLSGVICGSAIINIIEKYLYEEDIMMTKIQEFVKHLKKSTKLIA

SEQ ID NO: 562 - protein, 331 aa, Mycobacterium leprae
MGSRRLAIVQRWRGQDEIPTDWGRCVLTIGVFDGVHRGHTELIAHTVQTGRARNVPTVLMTFDPHPMEVVYPGSHPAQLTTLTRRAELIEELGIDVFLVMPFTTDFMKLTPDRYVHELLVEHLHVVEVVVGENFTFGKKAAGNVIMLRRAGQRFGFAVGSMSLLSEHRGNETVAFSSTYIRSCVDAGDMMAATEALGRPHRVEGMVVRGQGRGTELGFPTANVASPMYSATPADGVYAAWFTVLGHGPVTGTVVPGECYQAAVSVGTNPTFSGRTRTVEAFVLDAVADLYGQHVALDFVGRIRGQRKFDSVADLVAEMEKDIDRARALLAD

SEQ ID NO: 563 - protein, 345 aa, Glycine max
IRIPIGHLCNMFVSLDNRNTVHLNRPHNDATRFVVESLRIHDMVTNLESIGILLWKTYMTHTGLEFDGVPGTLKYLWEHGYQDKFKDGNGDDEKQPGTGDNESQKNKSNPNSTLTKTQKNENRRDNSIALITENLVKIFVCSIVEKISLDEAAKLLLGDAHNTSVMRTKVRRLYDIANVLSSMNLIEKTHTMDTRKPAFRWLGSEGKTWDETLHKSNLNDSRKRAFGSDITNISFERNKVELFTSGDLNPNPKKPRMENGSGLGEADENNLKQGIKQASKSYEFGPFAPACVPKVGASQNNNMKQVHDWGSLATAHSPQYQNEASPSLLQQGHCTVKASSCASFV

SEQ ID NO: 564 - protein, 481 aa, Oryza sativa
  unsure (1)..(481): unsure at all Xaa locations
KYRGEKAHQDCFFRFLGLLLRQHEEALLLXLFLLILAASVVHGEDGAYIGVNIGTAMTSVPAPTQITTLLRSQNIRHVRLYDADPAMLAALANTGIRVIVSVPNEQLLAIGNSNATAANWVARNVAAHYPSVNITAIAVGSEVLSTLPNAAPLLMPAIRYLQNALVAAALDRYIKISTPHSSSIILDSFPPSQAFFNRSLDPVLVPLLKFLQSTGSPLMLNVYPYYDYMRSNGVIPLDYALFRPLPPNKEAVDANTLLHYTNVFDAVVDAAYFAMAYLNVTNVPVMVTETGWPHKGDPSNEPDATSDNADTYNSNLIRHVMNTTGTPKHPGVAVPTYIYELYDEDTRPGSTSEKYWGLFDMNGIPAYTLHLTGSGVLLANDTTNQTYCVAREGADEKMLQAALDWACGPGKVDCSALMQGQPCYESARTPTPTTMAWATWMELFRETSGSTHWRYQTRIPPREPTRTGTSLTISSSSNSPX

SEQ ID NO: 565 - protein, 473 aa, Leuconostoc mesenteroides subsp. mesenteroides ATCC 8293
MKKTKIVSTLGPSSSDVETIVKLIQAGANVFRFNFSHGDHEEHLGRMNAVHEAEKITGKTVGILLDTKGAEIRTTKQADGKIEFHTGDTLRIAMDENLEGTKEKIAVTYAGLFDDVKEGGQVLFDDGLLGTTVIEKDSATRELVVRVDNDGILGSRKGVNAPGVSINLPGITEKDADDIRFGLDHEINYIAASFVRKPEDVLEIRGLLKEKNMEHVQIIPKIESQEGIDNLDAILEVSDALMVPRGDMGVEIPAENVPLVQKDMIRKMNKAGLPVITATQMLDSMEENPRPTRAEASDVANAVFDGTDATMLSGESANGDYPVESVATMAAIDEKAETSLRENGRHEDIFFDETDSTEAVAASVARIARNVNAKAVVVSTNSGYTARMVSKHRPDVNILAVTYSERVQRGLTLNYGVVPVVYDAPKTIDEMVDLAKKAVKDQGLANSGDTIVIAAGVPMSQSGTTNMLTVQTV

SEQ ID NO: 566 - protein, 498 aa, Myoporum mauritianum
  unsure (1)..(498): unsure at all Xaa locations
XXXXXTTSGSGVSTLEKKNQGRIVQIIGPVLDVAFPPGKMPNIYNALVVKGRDTGGQPINVTCEVQQLLGNNRVRAVAMSATDGLTRGMEVIDTGAPLSVPVGGATLGRIFNVLGEPIDNLGPVDISTTFPIHRSAPAFIQLDTKLSIFETGIKVVDLLAPYRRGGKIGLFGGAGVGKTVLIMELINNIAKAHGGVSVFGGVGERTREGNDLYMEMKESGVINEENIAESKVALVYGQMNEPPGARMRVGLTALTMAEYFRDVNEQDVLLFIDNIFRFVQAGSEVSALLGRMPSAVGYQPTLSTEMGSLQERITSTKEGSITSIQAVYVPADDLTDPAPATTFAHLDATTVLSRGLAAKGIYPAVDPLDSTSTMLQPRIVGEEHYETAQRVKQTLQRYKELQDIIAILGLDELSEDDRLTVARARKIERFLSQPFFVAEVFTGSPGKYVGLAETIRGFQLILSGELDGLPEQAFYLVGNIDEATTKAMNLEMESNLKK

SEQ ID NO: 567 - protein, 152 aa, Triticum aestivum
  unsure (1)..(152): unsure at all Xaa locations
LHGTTVAEXMPLIATCSENRQQGMCRQLVDYIEEMLKSLEVEMLLLFAIPNIVDTWTSAFGFRLIEESDKKKLSKVRLVSIPGTVLLKKDLYERSPETEAGELRTEQQQPLEDTGPVCTTETNLADELGGSDTNLPLADPPSAVALGKCHVD

SEQ ID NO: 568 - protein, 544 aa, Thermoplasma acidophilum
MKTKIVATIGPASSSPEIMKQMIDNGLSLVRINSAHADIKDVSKITQMVRSINRDVGIMIDLKGPELRTGEFAGGTLKISSGKDYVMGKDIVLNNMNVLSAVQVGDRILMSDGEVSFEVESTDPFTIRALNDGVLRDRSRVNIPGRFIELGTITDRDRAFIREGIADGVDFFALSFVQKSENVDSLRDFVIDSGGDQYIISKIETKSGLDNIEEIVKSSDGIMVARGDLGVELPLKEVVLAQKHIIKTAHEDGDFTIVATQVLESMVNNSSPTRAEISDITNAIIDNADALMLSEESAIGKYPVQAVRTLKEVSDYVEDKVSFDSSYYFKGNTIAYSVARAAKILSDDIKSDGIVALTHTGSTVRMISSLRPKAMVYAATVSESLARKLNIYFGVLPLHMEGNAEDLSFSEIMEYIVRSGRFADGSKLVMTSGDPYFTFGGTNDVKVAVVGKFIGRGYSFGDSLSGTATYGTKGDILMSEDGRIPGTDFRAFIFTSDIKPSLMSSLKGKTVVTKARLVRQIKEGERIYIDGNTGIILMASPDQK

SEQ ID NO: 569 - protein, 242 aa, Shigella dysenteriae
LKERKEGAFVPFVTLGDPGIEQSLKIIDTLIEAGADALELGIPFSDPLADGPTIQNATLRAFAAGVTPAQCFEMLALIRQKHPTIPIGLLMYANLVFNKGIDEFYAQCEKVGVDSVLVADVPVEESAPFRQAALRHNVAPIFICPPNADDDLLRQIASYGRGYTYLLSRAGVTGAENRAALPLNHLVAKLKEYNAAPSLQGFGISAPDHVKAAIDARAAGAISGSAIVKIIEQHINEPEKML

SEQ ID NO: 570 - protein, 593 aa, Saccharomyces pastorianus
EIKRISLEDHAESEYGSIYSVSGPVVIAENMIGCAMYELVKVGHDNLVGEVIRIDGDKATIQVYEETAGLTVGDPVLRTGKPLSVELGPGLMETIYDGIQRPLKAIKEESQSIYIPRGIDTPSLDRTIKWQFTPGKFQVGDHISGGDIYGSVFENSLISSHKILLPPRSRGTITWIAPAGEYTLDEKILEVEFDGKKSDFTLYHTWPVRVPRPVTEKLSADYPLLTGQRVLDALFPCVQGGTTCIPGAFGCGKTVISQSLSKYSNSDAIIYVGCGERGNEMAEVLMEFPELYTEMSGTKEPIMKRTTLVANTSNMPVAAREASIYTGITLAEYFRDQGKNVSMIADSSSRWAEALREISGRLGEMPADQGFPAYLGAKLASFYERAGKAVALGSPDRIGSVSIVAAVSPAGGDFSDPVTTATLGITQVFWGLDKKLAQRKHFPSINTSVSYSKYTTVLNKFYDSDYPEFPVLRDRMKEILSNAEELEQVVQLVGKSALSDSDKITLDVAALVKEDFLQQNGYSTYDAFCPIWKTYDMMRAFIAYHDEAQKAVANGANWSKLADSTSDVKHSVSSSKFFEPSRGEKEVHGDFEK

SEQ ID NO: 571 - protein, 272 aa, Methanosarcina acetivorans C2A
MATELRATEHGRQKISEKFDELKQKKEGALIGYVMAGDPSAEATFGIVKALVNGGADIIELGFPFSDPVADGPTIQAAGQRALAAGMDIEHYFELVRGLGVEVPLVCMTYYNPVFRYGVDKFVEHAADAGISGLIIPDIPVEEAADLKSSCEKYGLDLIFLVAPTTTDARIRKILERGSGFIYLVSRLGVTGARADVSGSTKELLSRVKTDIPKAVGFGISTGKQAAEVRKAGADAVIVGSVFVRIIEEGNGVNEKLEALARELKSGILGAN

SEQ ID NO: 572 - protein, 481 aa, Napoleonaea vogelii
  unsure (1)..(481): unsure at all Xaa locations
VLEKKNXGRILQIIGPVLNVAFPPGKMPNIYNALVVKGRDTVGQPINVTCEVQQLLGNNRVRAVAMSATDGLMRGMEVIDTGAPLSVPVGGATLGRIFNVLGEPIDNLGPVDTRTTSPIHRSAPAFIQLDTKLSIFETGIKVVDLLAPYRRGGKIGLFGGAGVGKTVLIMELINNIAKAHGGVSVFGGVGERTREGNDLYMEMKESGVINEQNIAESKVALVYGQMNEPPGARMRVGLTALTMAEYFRDVNEQDVLLFIDNIFRFVQAGSEVSALLGRMPSAVGYQPTLSTEMGSLQERITSTKEGSITSIQAVYVPADDLTDPAPATTFAHLDATTVLSRGLAAKGIYPAVDPLDSTSTMLQPRIVGEEHYETAQRVKQTLQRYKELQDIIAILGLDELSEEDRLTVARARKIERFLSQPFFVAEVFTGSPGKYVGLAETIRGFQLILSGELDGLPEQAFYLVGNIDEATAKAMNLDMET

SEQ ID NO: 573 - protein, 472 aa, Atalantia ceylanica
LANKNSGHIAQIIGPVLDVAFPPGKMPNIYNALVVKGRDTVDQPINVTCEVQQLLGNNRVRAVAMSATDGLTRGMEVIDTGAPLSVPVGGVTLGRIFNVLGEPVDNLGPVDTRTTSPIHKSAPAFIQLDTRLSIFETGIKVVDLLAPYRRGGKIGLFGGAGVGKTVLIMELINNIAKAHGGVSVFGGVGERTREGNDLYMEMKESGVINEQNLSESKVALVYGQMNEPPGARMRVGLTALTMAEYFRDVNEQDVLLFIDNIFRFVQAGSEVSALLGRMPSAVGYQPTLSTEMGSLQERITSTKEGSITSIQAVYVPADDLTDPAPATTFAHLDATTVLSRGLAAKGIYPAVDPLDSTSTMLQPRIVGEEHYESAQRVKQTLQRYKELQDIIAILGLDELSEEDRLTVARARKIERFLSQPFFVAEVFTGSPGKYVGLAETIRGFKLILSGELDGLPEQAFYLVGNIDEVTAK

SEQ ID NO: 574 - protein, 720 aa, Oryza sativa (japonica cultivar-group)
MDWEQKEEGVNLCFLARSGGGGMQYHQGGSRMPPFARGGAYSRGYKQLYAPPQQQPPPQDKHEVLMEAGRLAAEYLVAKGVLPPASLQRRGVGGGGWVQLPPPPPPPPPPQGTLAFYGAQNGRRRLDDDDDGNPNPRSRRNRGGENNNDDSSSSYNGRGKRKFGAYSRHSDWGRDKGRSRGNSDSRSYDDEDDDGPPGYRRERRGGGRFDDAGSSMSGVAASKTEAMGESELEDTGSKVGSSSNFRKDVDPPQEVEGVDKLNKINEESNPSNSEVVEQMTNGESTSNNASCIVIDEEQTKAKYLPVPSDDKVSDEKPDDSSVLNEKIEDDETLAEKAEDDKTSDERVPGVKNNLRDDCNNLLSYCSYPNVPTRRRSIVAHRNAAPAHREVAVAEQIDLVSSEDETHMATDVTGHGSSLTNTQEGNKDGLACLEHTDTSTTCNQMVEPVRFQTEETQIGTDDLRGQKNIEQHYAVHESREENMLPPKVGVQQQVEEGMQIYNVDTPPQDEDLIASADKEKVAGVALLPSIKAEAVVAKEEDKFGQSSSFKICDLNLVGSPEVAELRNDPGLGQFSTAGCSMEPQNQQQEFRNTGNSADDTNMHAQIPLHNKVVQVIDLEDDSPIEAGACDTSKAKEENMANPAVTTDVLPGIQDGYNFAISDYLGADIPCYQPMQTDLPNGMSLNDSEGITVMDDSIYGSLSDIGFMEVWDQQPQDYEKFF

SEQ ID NO: 575 - protein, 268 aa, Xylella fastidiosa 9a5c
MHRIDETFRRLRAQSRKALIPFITAGDPSLEAAVPVMHALVRAGADVIELGVPFSDPMADGPVIQHSSERALQRGVGLAYVLQTVDVFRQSDAVTPVVLMGYLNPLEIYGIARFTQHAVACGVDGVLLVDLPPEEADEIRPIFSAAGLALIVLASPTTSASRLARLSGVAQGYLYYVSFSGVTGADRLDAQSAGDRLRGLRAQTQVPVVVGFGIRDAASAAVMAVDADGVVVGSALVTALSDAPDVDTACRRADAFLAPLRQALDAVK

SEQ ID NO: 576 - protein, 354 aa, Arabidopsis thaliana
MSSAIVVSQDAESLGLQIYSRKEKSLGVLVSNFLRLYNRDDVDLIGLDDAAGQLGVERRRIYDVVNILESIGIVARRGKNQYSWKGFGEIPRSLDELKEEGMRERLGYSSSNNSDKVSNGCEREEPLTLTPDDQENSSSSKMDQKKEKSLWLLAQNFVKMFLCSDDDLITLDSAAKALLSDSPDSVHMRTKVRRLYDIANVFASMNLIEKTHIPVTRKPAYRWLGSKSIAERGLSLFNSGEPKRVFGTEITNLRAKRNKTYCSSIRKQIGYKKHDEENTEQESKPAASKYVFGPFSPIGASKTNNDKVGKGRLLEIEALASTYQPQYCNQEITGLLGHFTEAWKKWYAEVDRNK

SEQ ID NO: 577 - protein, 1640 aa, Candida albicans
MFDYLMRLLDSRTSRLGPTHALRSIHADYIGGMNSNFRKWYFAAQLDIDDFVGFDNLAKNGKIKGSNDPVATLEQAESQWSTNMLALSPTDSVIQLAIYLLIWGEANNIRFMPECICFIFKCCNDFYFSIDPDTPVTTVTPSFLDHIITPLYNFYRDQSYILVDGKYRRRDKDHESVIGYDDMNQLFWYSKGLERLVLADKKSRLMSLPPGERYEELNQVLWNRVFYKTFKENRGWSHVLVNFHRVWIIHSAVFWYYTAFNSPTLYTKNYQPALDNQPTTQARLSVLAFGGVVAIVIDIISLLFELRFIPRKWTGAQPVSKRLALLILALILNVGPSVYLFMFIPLNVQNTVGLVISAFQFSFSVIMVLYLSTVPLGRLFSKKPKANDRRFLPQRSFVTNFYSLAEGDRVASYGLWFAIFVSKFIESYFFLTLSLRDPVRELSIMKMSRCAGEVWLGNWFCTRQPTIVLGLIYLTDLVLFILDTYLWYIVWNTVFSVCRSFYIGVSIWTPWRNIFSRLPKRIFSKIISVSGDKNIKSKLLVSQVWNSIIISMYREHLISLEHVQKLIYKQIDNPGVEGDSVLKEPIFFVSQEDQTIKSSLFQDQAEAQRRITFFAQSLSTPMPEVGPVHLMPSFTVLIPHYSEKITLSLREIIREEEQYSHVTMLEYLKSLHPLEWSCFVKDTKLLAEEFETDSSSAEIKREKLDDLPYYSVGFKVATPEYILRTRIWASLRSQTLYRTISGFMNYSRAIKLLFDVENPDSTKFGTENDKLEQAAIMAHRKFRIITSMQRLKYFTPEEKENTEFLLRAYPELQICYLDEEVDEASGEIVYYSALVDGSCAIMENGEREPKYRIRLSGNPILGDGKSDNQNHSLIFCRGEYIQLVDANQDNYLEECLKIRSILAEFEEATFPLDPYSTDLEGTESVYPVAIIGTREYIFSENIGILGDVAAGKEQTFGTLFARTLAHIGGKLHYGHPDFLNGIFMTTRGGVSKAQKGLHLNEDIYAGMNVVLRGGRIKHCEYMQCGKGRDLGFGSILNFTTKIGAGMGEQMLSREYFYMGTQLPLDRFLSFYYAHSGFHLNNLFIMLSIHLFLLVGANLAALTSESTICEYDRFRPITDPKRPHGCYNLIPVVHWLQRCIFSIFIVFVISFVPLAVQELTERGFYKAITRLGKQFASFSPLFEVFVCKIYAHSLSSDISIGGARYLATGRGFATIRVPFATLYSRFAVESLYYGSICGLLIFYCSLSMWKLQLLYFWITILGLLICPFLYNPNQFSWNDFFLDYKECIQWFYRGNSKPRLSSWINFTRLKRSRIVGVKSKRYSINEEIKVVSEVKPSRFKLIISESFLQLCVITLVGLAYLFTNSQNGSRGTYPVNSILRILIISFVPIGVNLVILIACFVVSISIGPIFTLFCKKFPSFVAAIAHLLAVANHVFFFELLWLFQNWNFSVTVLGFALSALIQCWFLQMMTILLVSREFRHDRSNRSWWSGKWATAGLGWYIITQPMREAVCKLSEMSYFAGDLVATHIILFAQIPILLIPYADKWHTLMLFWLKPGNQIRPRILSKRQKRRRRFQANLYLLIFLLGLILFSSIFVLPLIATKYFDIEFSEYIPEFFHPLFQPYDAPTNSKGLKKKLEIKHY

SEQ ID NO: 578 - protein, 228 aa, Rhodobacter sphaeroides
MDIGLVIFDCDGVLVDSEVLAVAVLIAELDRAGARVDEAFVHRHFLGRSFPVVQEVVQRQFGVTLPETFQAGERARLLAAFETGLRAMPGAAETVRALAVPFCLATSSTPARLTRSLEITGLAALFEGRCFTASQVARGKPAPDLFLLAAAEMGVAPARCLVIEDTEPGVRAGLAAGMQVWRFTGGSHFANRSPEDAPDARPHRRFDSFDRFYETLPGLRRANCEILT

SEQ ID NO: 579 - protein, 483 aa, Methylobacterium extorquens
MMEAPLKRSRRTKIVATLGPASDTPEMIEKLFHAGADVFRINMSHLAREKLPERIEVIRTIEREGKRPIGILVDLQGPKLRLGTFVGDAAVLENGQTFVLDSDPTPGDTDRVFLPHPEILSALEPSHGILIDDGKLRLIVTEVSEGRAVTRVEVGGRISNRKGVSLPHTALPVPAMTEKDRGDLEAGLAAGADWIAVSFVQRPEDVAEVKKVAAGRALVMAKIEKPQALTRLDEIIEISDGIMVARGDLGVEMPLEQVPGVQKRITRVARRLGKPVVVATQMLESMITSPVPTRAEVSDVATAVYEGADAVMLSAESAAGDFPVEAIGTMNRIAEQVERDALYWSILMAQRSEPEPTASDAIAAAAHQIVEALSLRSIMAWTHSGSTVLRLARARPNASVIALTPKRETARRLTMAWGVHPIVTKDASDVDDMAFRAAKFAVRERFAEIGDRVIIVAGVPFGIPGATNMVRIAFVTREHAERA

SEQ ID NO: 580 - protein, 379 aa, Arabidopsis thaliana
MSDLSPERFKLAVTSPSSIPESSSALQLHHSYSRKQKSLGLLCTNFLALYNREGIEMVGLDDAASKLGVERRRIYDIVNVLESVGVLTRRAKNQYTWKGFSAIPGALKELQEEGVKDTFHRFYVNENVKGSDDEDDDEESSQPHSSSQTDSSKPGSLPQSSDPSKIDNRREKSLGLLTQNFIKLFICSEAIRIISLDDAAKLLLGDAHNTSIMRTKVRRLYDIANVLSSMNLIEKTHTLDSRKPAFKWLGYNGEPTFTLSSDLLQLESRKRAFGTDITNVNVKRSKSSSSSQENATERRLKMKKHSTPESSYNKSFDVHESRHGSRGGYHFGPFAPGTGTYPTAGLEDNSRRAFDVENLDSDYRPSYQNQGAYILFTSI

SEQ ID NO: 581 - protein, 289 aa, Oryza sativa (japonica cultivar-group)
MARVSHSRKRTRAPSNSNSKPTSQTQPPPPELTDRPVRVYADGIFDLFHFGHARALEQAKLLFPNTYLLVGCCNDELTNRYKGKTVMTQDERYESLRHCKWVDEVIPDAPWVLTQEFIDKHQIDYVAHDALPYADTSGAANDVYEFVKKIGKFKETKRTDGVSTSDLIMRILKDYNQYVMRNLARGYTRKDLGVSYVKEKQLQVNMKINKLRETVKAHQEKLQTVAKTAGINHEEWLANADRWVAGFLEKFEEHCHNMETAIKGRIQEKLRRQTSRGIIGGLMQQPVAA

SEQ ID NO: 582 - protein, 483 aa, Echiochilon collenettei
  unsure (1)..(483): unsure at all Xaa locations
SGVXXLEKNNLGRVVQIIGPVLDVAFSPGKMPNIYNALVVKGRDTAGQPINVTCEVQQLLGNNRVRAVAMSATDGLTRGMEVXDTGAALSVPVGGATLGRIFNVLGEPVDNLGPVDTRTTSPIHRSAPAFIQLDTKLSIFETGIKVVDLLAPYRRGGKIGLFGGAGVGKTVLIMELINNIAKAHGGVSVFGGVGERTREGNDLYMEMKXSGVINEENIAESKVALVYGQMNEPPGARMRVGLTALTMAEYFRDVNXQDVLLFIDNIFRFVQAGSEVSALLGRMPSAVGYQPTLSTEMGSLQERITSTKAGSITSIQAVYVPADDLTDPAPATTFAHLDATTVLSRGLAAKGIYPAVDPLDSTSTMLQPRIVGEEHYETAQRVKETLQRYKELQDIIAILGLDELSEEDRLTVARARKIERFLSQPFFVAEVFTGSPGKYVGLAETIRGFQLILSGELDGLPEQAFYLVGNIDEATAKAMNLXM

SEQ ID NO: 583 - protein, 374 aa, Glycine max
MQQGKMRPIFCGNFEYDARQSELERLFRRYGKVDRVDMKSGFAFIYMEDERDAEAAIRALDRVEFGRKGRRLRVEWTKHERGVRRPASSRRSSAIGRPSKTLFVINFDTYHTRTRDLERHFEPYGKIVSVRIRRNFAFVQYESEDDASRALEATNMSKLLDRVISVEFAVKDDDDRRNGYSPERGRDRQRDRSRDGRRSPSPYRKERGSPDYGRGPSPYQRERGSPDYGRDRSRSRSPPRRERASPAYGRRSISPYRREREGSEPVRDSSRSPYHKERGRTDHGISPSQSPEGRGRKSPQNGHGSSRSPRDTGKTSPENGHGSGSPDEKGNPSPYNGYGGSPNTVPDPRDSPNYGGPESPMHERYHSQSPPAEE

SEQ ID NO: 584 - protein, 248 aa, Helianthus annuus
MSFQNEDSGDISPQRRIGKGKIEIKRIENTTNRQVTFCKRRNGLLKKAYELSVLCDAEVALIVFSSRGRLYEYANNSVTGTIDRYKKSCLDPPSTGSVAEANAQFYQQEATKLRQQIANLQNQNRQFYRNIMGESLADMPGKELKNLESKLEKAINRIRAKKNELLFAEIEYMQKRELELHNSNQFLRARIAENERAQQQHMSLMPGSSGYNDLGPHQSFDGLNDLQTNELQLNNNYSCQDQTPLQLV

SEQ ID NO: 585 - protein, 222 aa, Secale cereale
SHAAEVTAGYYNLHDRDDYRPIARMLTRHHASLNFTCAEMRDSEQSSQAMSAPEELVQQVWSAGWREGLNIACENALPRYDPTAYNTILRNARPHGINHSSPTEHKLFGFTYLRLSNQLLEGQNYVNFKTFVDRMHANLPHDPSVDPVAPLQRSGPEIPIEVILQAAQPKLDPFPFEDHTDLPVQCLGGIGGGEVECPAGGIGGEVQQDPTGGMGGELPPAV

SEQ ID NO: 586 - protein, 490 aa, Stylisma patens
  unsure (1)..(490): unsure at all Xaa locations
MGINPXTSGSEVSAVEKKNLGRIVQIIGPVLDVAFPPGKMPNIYSALVIQGRDNEQMNVTCEVQQLLGNNRVRAVAMSATDGLMRGMEVIDTGAPISVPVGGATLGRIFNVLGAPVDNLGAVDTKTTSPIHRSAPAFIQLDTKLSIFETGIKVVDLLAPYRRGGKIGLFGGAGVGKTVLIMELINNIAKAHGGVSVFGGVGERTREGNDLYMEMKESRVINEENIAESKVALVYGQMNEPPGARMRVGLTALTMAEYFRDVNEQDVLLFIDNIFRFVQAGSEVSALLGRMPSAVGYQPTLSTEMGSLQERITSTKEGSITSIQAVYVPADDLTDPAPATTFAHLDATTVLSRGLAAKGIYPAVDPLDSTSTMLQPRIVGEEHYETAQRVKQTLQRYKELQDIIAILGLDELSEEDRLTVARARKIERFLSQPFFVAEVFTGSPGKYVGLAETIRGFELILSGELDVLPEQAFYLVGNIDEATVKAMNLKT

SEQ ID NO: 587 - protein, 476 aa, Thermobifida fusca
MLHVTRRAKIVATLGPATSSPEVLRKLVDAGLDVARLNLSHGTHDDHQTMYRNVRAAAEASGRNVGILADLQGPKIRLGTFVDGSVTLSPGDEFTITIDDVPGDRHRVSTTYKGLPGDVRPGDRVLIDDGRVVLECVKSTSTDVHTRVIVGGPVSNHKGLNLPGVSVAVPALTEKDERDLRWALEQGVDMVALSFVRSPADAEDVHRVMDEMGVHVPLIAKIEKPQAVERLQDIIEAFDGVMVARGDLGVELPLENVPMVQKRAIERCRDKAKPVIVATQMLESMIHNPRPTRAEASDVANAVLDGADAVMLSGETSVGKYPVETVQTMARIIAAAEQESLRASHILHRVPETVGGSIARAAAEVGATVGAKALVAFTSSGETARRLARYRSPIPLLAFTTEPATRAQLSLTWGVETHLVPWVDNTDDMVRQVENELLDMDYQKGDKVVIVAGSPPGTRGSTNMLRVHRMGDAISN

SEQ ID NO: 588 - protein, 494 aa, Limeum sp. Hoot 983
PTTSGPGVSTLEKKNLGRIAQIIGPVLDVAFPPGKMPNIYNALVVKGRDTAGQPINVTCEVQQLLGNNRVRAVAMSATDGLTRGMEVIDTGAPLSVPVGGATLGRIFNVLGEPVDNLGPVDTRTTSPIHRSAPAFTQLDTKLSIFETGIKVVDLLAPYRRGGKIGLFGGAGVGKTVLIMELINNIAKAHGGVSVFGGVGERTREGNDLYMEMKESGVINEENIAESKVALVYGQMNEPPGARMRVGLTALTMAEYFRDVNEQDVLLFIDNIFRFVQAGSEVSALLGRMPSAVGYQPTLSTEMGSLQERITSTKEGSITSIQAVYVPADDLTDPAPATTFAHLDATTVLSRGLAAKGIYPAVDPLDSTSTMLQPRIVGEEHYETAQRVKQTLQRYKELQDIIAILGLDELSEEDRLTVARARKIERFLSQPFFVAEVFTGSPGKYVGLAETIRGFQLILSGELDGLPEQAFYLVGNIDEATAKAMNLEMESKLKK

SEQ ID NO: 589 - protein, 436 aa, Magnetococcus sp. MC-1
MSPAHLGGTCYGVELTMPNNSSDSSSILHCSFCGKSQNEARKLIAGPSVFICDECVDLCMEIIREDKSDQLEKKRGGVPTPMEIKSTLDDYVIGQDNAKRTLAVAVYNHYKRLESNDTSADVEISKSNVLMIGPTGSGKTLLAQTLARLLDVPFTITDATTLTEAGYVGEDVENIILRLLQAADNDVEKAQRGIVFIDEIDKISRKSDNPSITRDVSGEGVQQALLKIIEGTVASVPPQGGRKHPQQEYLQVDTTNILVICGGAFNGLEKVIEKRSSKHHGIGFGATVRKNSKEESVNVLLKELEPEDLLAFGLIPEFVGRLPVVATLEELSKEALVRILTEPKNALVKQYQKLLEMENVKLTFTDGALEALAQRAIERKTGARGLRALLESTLLDIMFEIPSKQGVREVVINREVVEKQIEPLLIYAEEALEANA

SEQ ID NO: 590 - protein, 889 aa, Saccharomyces cerevisiae
MNQEEAIFRSADMTDCQLYIPLEVIREVTFLLGKMSVFMVMDLNKDLTEFQRGYVNQLRRFDEVERMVGFLNEVVEKHAAETWKYILHIDDEGNDIAQPDMADLINTMEPLSLENVNDMVKEITDCESRARQLDESLDSLRSKLNDLLEQRQVIFECSKFIEVNPGIAGRATNPEIEQEERDVDEFRMTPDDISETLSDAFSFDDETPQDRGALGNDLTRNQSVEDLSFLEQGYQHRYMITGSIRRTKVDILNRILWRLLRGNLIFQNFPIEEPLLEGKEKVEKDCFIIFTHGETLLKKVKRVIDSLNGKIVSLNTRSSELVDTLNRQIDDLQRILDTTEQTLHTELLVIHDQLPVWSAMTKREKYVYTTLNKFQQESQGLIAEGWVPSTELIHLQDSLKDYIETLGSEYSTVFNVILTNKLPPTYHRTNKFTQAFQSIVDAYGIATYKEINAGLATVVTFPFMFAIMFGDMGHGFILFLMALFLVLNERKFGAMHRDEIFDMAFTGRYVLLLMGAFSVYTGLLYNDIFSKSMTIFKSGWQWPSTFRKGESIEAKKTGVYPFGLDFAWHGTDNGLLFSNSYKMKLSILMGYAHMTYSFMFSYINYRAKNSKVDIIGNFIPGLVFMQSIFGYLSWAIVYKWSKDWIKDDKPAPGLLNMLINMFLAPGTIDDQLYSGQAKLQVVLLLALVCVPWLLLYKPLTLRRLNKNGGGGRPHGYQSVGNIEHEEQIAQQRHSAEGFQGMIISDVASVADSINESVGGGEQGPFNFGDVMIHQVIHTIEFCLNCISHTASYLRLWALSLAHAELSSVLWDMTISNAFSSKNSGSPLAVMKVVFLFAMWFVLTVCILVFMEGTSAMLHALRLHWVEAMSKFFEGEGYAYEPFSFRAIIE

SEQ ID NO: 591 - protein, 342 aa, Brassica rapa
MLASSPMLLFLLSLLMAYNFDTTAGQIGVCFGQMGNNIPNPSEVVAMFKQYSIPRMRMYGPNPDALNALRGSNIEFILDVPNGDLKRLADSQAEANTWVRDNVQKYNDVRFKYISVGNEVKPGEPGAAALIQAMQNIDRALSAAGLSNIKVSTTTFMGPSRNTYPPSRGRFKDEYRNFLQPVIGFLVNKRSPLLVNIYTYFGYMNRDVSLQFALLQPNSNNEFTDPNNQLRYLNFFDANLDSVYAALEKSGGGSLDVVVSESGWPTQGGPGASVPNAEAYVNNLRLHVNKNGSPKRQEAIETYIFAMFDEAPRQTSPNDEYEKYWGMFSPTTRQLKYGVKFN

SEQ ID NO: 592 - protein, 784 aa, Glycine max
ERERERERERERERERERERERERERSLCNIYNTSEDELRKTMEKANNVIADILKKQPCLASECDTGNLENIDKDGLTYFKDLMEESSLPSSLNMLEKDYDYMIRNKSELDERLFINEDDSLLASVSLSGGSVSVGGVKRKFDSMASPAKTITSPLSPHRSPASHANGIPGSANSKMAATPVSTAMTTAKWLRTVISPLPSKPSPELERFLTSCDRDVTSDVVRRAQIILQAIFPSSPLGERCVTGSLQSANVVDNIWAEQRRLEALKLYYRVLEAMCRAEAQVLHATNLTSLLTNERFHRCMLACSAELVLATHKTVTMLFPAVLERTGITAFDLSKVIESFIRHEESLPRELRRHLNSLEEPTRPRLLESMVWEKGSSMYNSLAVARPSLSAEINRLGLLAEPMPSLDEIAMHINFSCGGLPPVPTLPKLESSPTQNGDIRSPKRNVLMERNSFTSPVKDRLLPFNSLKSKLPPPPLQSAFASPTKPNPGGGGETCAETGINIFFGKIIKLGAVRISGMVERLQLSQQIRENVYSLFQRILNQWTSLFFNRHIDQIILCCFYGVAKISQLNLTFKEIVYNYRKQPHCKPQVFRSVFVDWSLARRNGRTGQEHIDIITFYNEIFIPSVKPLLVELGPAGPTTKSDRIPEVNKNDGHLAQCPGSPKISPFPTLPDMSPKKVSATHNVYVSPLRSSKMEALISHSSKSYYACVGESTHAYQSPSKDLTAINNRLNGNRKVRGPLNFDDVDFGLVSDSMVANSLYLQNGSCASSSGAPFKSEQPDS

SEQ ID NO: 593 - protein, 394 aa, Polytrichum pallidisetum
PVGEATLGRIFNVLGEPVDNLGPVDASTTFPIHRSAPAFTQLDTKLSIFETGIKVVDLLAPYRRGGKIGLFGGAGVGKTVLIMELINNIAKAHGGVSVFGGVGERTREGNDLYMEMKESKVINEQNISESKVALVYGQMNEPPGARMRVGLTALTMAEYFRDINKQDVLLFIDNIFRFVQAGSEVSALLGRMPSAVGYQPTLSTEMGTLQERITSTKEGSITSIQAVYVPADDLTDPAPATTFAHLDATTVLSRGLAAKGIYPAVDPLDSTSTMLQPWIVGEEHYETAQGVKETLQRYKELQDIIAILGLDELSEEDRLTVARARKIERFLSQPFFVAEVFTGSPGKYVSLIETIKGFQMILSGELDSLPEQAFYLVGNIDEAIAKAATLQVES

SEQ ID NO: 594 - protein, 506 aa, Thermosynechococcus elongatus BP-1
MLLEAPTVPISPAALLHSLLELRQEITKEGEARFQEWQLKIKRSEFIPSARNLAYYLALRWRDLRAMQMALMPWGLSSLGRIESRVLPNLDAVINTLGALCHTHGSLPPRPPLDAFFAGDRQLRRQTEELFGPIRGKRHVRIMVTLPTEAATDRQWSITLLRKGMNCARVNCAHDDPATWEAMIEHLRAASHITGQPCKILMDLGGPKPRIADIFPETVRVHSGDRLRLTTEICPEGGEIPQFTCSLPEIVPQLEVGQRVWIDDGRTGGRIVSKDAQGVELTITHCKEGQRLKVAKGLNFPDSDLRLCPLTASDREHLAFACRYADIIGYSYVQSAEDIALLQRELAHCCGDCADQMGIIAKIETPKAIRALPEMIIQAAGRQPFGVMIARGDLAVEIGYQRLAEMQEEILWLCEAAHVPVVWATQVLENLVKKGVPSRAEITDAAMAERAECVMLNKGPYVGLAVDILDDVLARMEAHQQKKTPQLRALHSWHPDKTIGRPSICD

SEQ ID NO: 595 - protein, 224 aa, Streptococcus pneumoniae
MPKTLTEKLNAIKATGKGIFVPYIMAGDHEKGLDGLAETIHFLEDLGVSAIEVGIPFSDPVADGPVIEEAGLRSLAHGTSTQALVETLKTIETEVPLVIMTYFNPLFQYGVENFVKDLVDTAVKGLIIPDLPHEHANFVEPFLADTDIALIPLVSLTTGLERQKELIEGAEGFVYAVAINGVTGKSGNYRADLDKHLAQLHQVADIPVLTGFGVSSQADVERFN

SEQ ID NO: 596 - protein, 425 aa, Thermoanaerobacter tengcongensis
MAKYDDHKQLKCSFCGKTQDQVRRLVAGPGVYICDECIELCQEIINEEFEEDMDMAMRDLPKPKEIKAFLDQYVIGQDRAKKALAVAVYNHYKRINSKVKSDDVELQKSNILLLGPTGSGKTLLAQTLAKLLNVPFAIADATTLTEAGYVGEDVENILLRLIQAADYDIERAEKGIIYIDEIDKIARKSENPSITRDVSGEGVQQALLKILEGTIANVPPQGGRKHPHQEFIQIDTTNILFICGGAFEGIDKIIESRIGKKSLGFGAEVQSKKEKDVGEILKHIMPEDLLKFGMIPEFIGRVPIVVTLDPLTKDDLVRILTEPKNALVKQYEKLFEMDGVKLEFEKKALDLIAEMALERGTGARGLRAILEDIMLDVMYEIPSDETIEKCIITEETVRKIAPPTLVYADAQKIGRKKAKKTESVS

SEQ ID NO: 597 - protein, 275 aa, Prochlorococcus marinus str. MIT 9313
MADFLAPKSNTHATISSRFQRVQAEGRLALMPFLMAGDPDLETTAEVLLSLEQSGADMIELGIPYSDPLADGPVIQAAASRALASGTTPARVLQMLIDLRGKLSIPVILFTYTNPLFNRGMERFCDEAAEAGVAGLVVPDLPLEEAERLSPLASARGLDLVLLVAPTTPAERMARIAESSRGFTYLVSVTGVTGERSVMEDRVQSLVQQLKLSGSNPVAVGFGISGPQQVRQVRSWGADGAIVGSALVKRMAAAAPGLVAQEAGLFCKELRNAAG

SEQ ID NO: 598 - protein, 42 aa, Glycine max
MASGATCVQRLDGSRDSAIHTKYRISLRSSSMQEPRYPLPRV

SEQ ID NO: 599 - protein, 310 aa, Triticum aestivum
  unsure (1)..(310): unsure at all Xaa locations
MIPEAEECSCLSLGRLPWLRPPRRLAKPAAVRSRPVSVTMAKLMAKGKTALIPYITAGDPDLATTAEALHLLDACGADVIELGXVPCSDPLSWYCAVQPGLGIAEGLSLAAAAVGRPCLRWVNEVAAGGDAWAAAVAENEEALVLWSREKPDLMRIARCKTDRNAHRLWPLIAVACICWLNAKXDQSRVWRSPTMPAIPERENLGGSRKASAGVIYLVSINVVTGPXVNIVGLRLKSLIRQSRKGHWTTLLLLVFVISEPHARIAESSLELRYGLIIGSGLVKHWGHAASPSLGLRRLQASGRSMEHARP

SEQ ID NO: 600 - protein, 496 aa, Heliconia rostrata
MRINPTTSSPAVSTLEEQNLGRIAQIIGPVLDVVFPPGKMPNIYNALVVKGRDTIGQQINVTCEVQQLLGNNRVRAVAMSATDGLMRGMEVIDTGAPLSVPVGGATLGRIFNVLGEPVDNLGPVDTSTTSPIHRPAPAFIQLETKLSIFETGIKVVDLLAPYRRGGKIGLFGGAGVGKTVLIMELINNIAKAHGGVSVFGGVGERTREGNDLYMEMKESGVINEKNIAESKVALVYGQMNEPPGARMRVGLTALTMAEYFRDVNEQDVLLFIDNIFRFVQAGSEVSALLGRMPSAVGYQPTLSTEMGSLQERITSTKDGSITSIQAVYVPADDLTDPAPATTFAHLDATTVLSRGLAAKGIYPAVDPLDSTSTMLQPRIVGEEHYETAQRVKQTSQRYKELQDIIAILGLDELSEEDRLTVARARKIERFLSQPFFVAEVFTGSPGKYVGLAETIRGFQLILSGELDSLPEQAFYLVGNIDEATAKAMNLEEENKL

SEQ ID NO: 601 - protein, 605 aa, Prochlorococcus marinus str. MIT 9313
MVVSAMFQVPLMAQIDLTRRTKIVATIGPATESAERIRELVEVGATTFRLNFSHGDHDEHAKRISTIRQVSDELGMHIGILQDLQGPKIRLGRFDKGPITLANGDSFALTSKQVQCNQSVATVTYDKLADEVTTGSRILLDDGRVEMKVLKIDQSEQTLHCIVTVGGVLSNNKGVNFPDVQLSVRALTEKDRQDLAFGLQQGVDWVALSFVRNPSDMKEIRKLIRDHGHSTPVIAKIEKFEAIDQIDSILPLCDGVMVARGDLGVEMPAEEVPLLQKDLIRKANSLGIPIITATQMLDSMASSPRPTRAEVSDVANAILDGTDAVMLSNETAVGDYPVEAVQTMATIARRIERDYPQRPIETYLASTISNAISSAVSSIASHLNAAAIVPLTESGATAHNVSKFRPAAPILAVTNKLAVARKLQLAWGVTPLLVPTQKSTTATFSDAIAVAQELGLLKEGDLTIQTAGTLAGVSGSTDLVKVGIVSAVLGQGIGIGNGTVSGKVRFAFSPNDSTKIEPGEILVIHETSDDYLDAIRKSAGVITEQEGEEYHAEMISKRLGIPFIIGIAHATRNLLEGEVVTMQLSNGKVHRGTGGKLPMKLDSMD

SEQ ID NO: 602 - protein, 262 aa, Oceanobacillus iheyensis HTE831
MGKSKLDAVLKEKTQAKKPIFVPYIMAGDGGIDNLNKRIQFLEEAGASAVELGIPFSDPVADGPVIQDAGQRALANKTTIGSVLEALESEKSQRNIPVVLMTYINPVWKYGFEQFARDCSQAGVDGIIIPDIPMEEEDDVASSLTQHDIAFIRLAAMTSTEDRLERIAKRSEGFLYAVSVTGTTGERAQHENDAFHFLEKLKQISHVPVLAGFGISTAERARELSAACDGVVVGSKIVQLFEQGDEDGIHSLIRESIGEKVI

SEQ ID NO: 603 - protein, 498 aa, Peltoboykinia tellimoides
  unsure (1)..(498): unsure at all Xaa locations
MRINPTXXDPGVSTLEKKNLGRIVQIIGPVLDVAFPPGKMPYIYNALVVKGRDTVGQQINVTCEVQQLLGNNRVRAVAMSATDGLMRGMDVIDTGAALSVPVGGATLGRIFNVLGEPVDNLGPVDTRTTSPIHRSAPAFIQLDTKLSIFETGIKVVDLLAPYRRGGKIGLFGGAGVGKTVLIMELINNIAKAHGGVSVFGGVGERTREGNDLYMEMKESGVINEQNIAESKVALVYGQMNEPPGARMRVGLTALTMAEYFRDVNEQDVLLFIDNIFRFVQAGSEVSALLGRMPSAVGYQPTLSTEMGTLQERITSTKEGSITSIQAVYVPADDLTDPAPATTFAHLDATTVLSRGLAAKGIYPAVDPLDSTSTMLQPRIVGEEHYEIAQRVKQTLQRYKELQDIIAILGLDELSEEDRLTVARARKIERFLSQPFFVAEVFTGSPGKYVGLAETIRGFQLILSGELDGLPEQAFYLVGNIDEATAKAMNLEMESNLKK

SEQ ID NO: 604 - protein, 500 aa, Saccharomyces cerevisiae
MSRLERLTSLNVVAGSDLRRTSIIGTIGPKTNNPETLVALRKAGLNIVRMNFSHGSYEYHKSVIDNARKSEELYPGRPLAIALDTKGPEIRTGTTTNDVDYPIPPNHEMIFTTDDKYAKACDDKIMYVDYKNITKVISAGRIIYVDDGVLSFQVLEVVDDKTLKVKALNAGKICSHKGVNLPGTDVDLPALSEKDKEDLRFGVKNGVHMVFASFIRTANDVLTIREVLGEQGKDVKIIVKIENQQGVNNFDEILKVTDGVMVARGDLGIEIPAPEVLAVQKKLIAKSNLAGKPVICATQMLESMTYNPRPTRAEVSDVGNAILDGADCVMLSGETAKGNYPINAVTTMAETAVIAEQAIAYLPNYDDMRNCTPKPTSTTETVAASAVAAVFEQKAKAIIVLSTSGTTPRLVSKYRPNCPIILVTRCPRAARFSHLYRGVFPFVFEKEPVSDWTDDVEARINFGIEKAKEFGILKKGDTYVSIQGFKAGAGHSNTLQVSTV

SEQ ID NO: 605 - protein, 1186 aa, Neurospora crassa
MPSVYSTVFQNVIRSGFSKSFTHGYAQSFVAATHHNVLNPQNRPSFARRSSTRLGGRLSTLGLQDAFRTSSNLNAGGSVEPRHDNKTTVLPSNAGLLDAYYEHLQKSQAAQEAGEEHDQEWVQFQFPKLIEWKPSATSILAQGDANTLALAADGVAKLDDGVSRVPPEAEAALAHINARIEEEIEVRKQLEAVEEELESLRATSPALAEKLEEEIRSRSRTPSIHLRTPASVARIATPPLDAQSISYAVHLTKLSEAARYAEIPAVFEGMLLANIQPTATAYNALLMAAIHLPSEKSEIVSKALDVYADMLKRKVSPDSDTYNILVGLLASRSLEVFASKSLLQDKRLRFGGMDEPGKFMFASHELEYAILCEDDRLDLALKLFQASVKSDKAVYSSETYHQLISACAQSGRVSDMLHLFEHLEANRVTPFAATFPAMITAFANAGDLISAVECYNEYRNLAIANDNGEPTLQDRLDSQVYAAVINAYVVSDKLEGAMKFYKKIVEEYEASAADIKDAIISGGFVKGFLDRGIYEEALRWAQSVEQDARGRVMSQVATAAADYGYKNVAITAFSNIASHDEAANSAIALLAMSVRQADVASAARYWAALSHPEVKATSSFIEPTAMFAIALIGSGQVVEGLTEAEHMFHRIRTSATAETKPQVTDEIEEAAEFIHGFMAARGVTDPRLLPSPASYAPQSFPASPHPATPTASAFEDTFDPYAHSTDFKGSALISEDLESNGRKGPKLNDALTRFRNMRRVGRHPRYVTYAKLISAAARDGNMDLCFDILAMARTDVPLLPQYAVVRYGWSSILDAMVGACLTLGDRVGAEQYHQELLAMGSTPSANTFGLYITTLKESTKTFDEASEAVKIFHRAKIEGVEPSSFLYNALIGKLGKARRIDDCLFYFNEMRKMGIKPTSVTYGTIVNALCRVSDEKFAEELFDEMEAMPNYKARPAPYNSMMQFFLTTKRDKTKVLEYFERMKAKGISPTSHTFKLLVDTHATLDPVDMTAAESVLDMIRASGQHPEPVHYASLIHARGCVLHDMEGARKVFDSVINDVSIAPSPCLFQALFEAMVANHHITGTEPMLAEMRARRIEMTPYIANTLIHGWAADKNIAKAKEIYAAVGREKREPSTYEAMTRAFLAVEERESAKGVVSEMLGRGYPSAVVNKVLELLGGGNAEEASA

SEQ ID NO: 606 - protein, 421 aa, Desulfitobacterium hafniense
MAKYNDEKNQLKCSFCGKTQDQVKKLVAGPGVYICDECIELCNEIIEEELNEDLGMEIGDIPKPKEIRAILDQYVIGQDEAKKALAVAVYNHYKRINLGMKIDDVELQKSNIVMLGPTGSGKTLLASTLAKVLNVPFAIADATSLTEAGYVGEDVENILLKLIQAADYDVEKAEKGIVYIDEIDKIARKSENPSITRDVSGEGVQQALLKILEGTVASVPPQGGRKHPHQEFIQLDTTNILFIVGGAFDGIDKIIQNRIGKKVMGFGAEIKKKSEQNIGETLRELLPADLLKFGLIPEFVGRLPVMVKLDALDEEALVRILTEPKNALVKQYEKLLELDGVALEFKEEALKAIAEEAIRRNTGARGLRAIVEEIMQNVMYDLPSRNDVTKCVVTKDVILKKEEPLLVTIDKSKKNKKEESA

SEQ ID NO: 607 - protein, 462 aa, Wigglesworthia glossinidia endosymbiont of Glossina brevipalpis
MDTGKIVQIIGPVIDVKFEISFIPKINFALEIKIKNKKLIMEVMQQIGDGIVRCILMGSSDGLKRGLKVFNLNKGIEVPVGKPTLGRIMNVLGDPIDRKGKILSSEYRPIHNKSPSYNEISSSDELLETGIKIIDLICPFAKGGKIGLFGGAGVGKTVNMMELIRNIAIEHSGYSVFSGVGERTREGNDFYNEMISSNVIDKVSLVYGQMNEPPGNRLRVALTGLTLAEKFRDEGNDVLFFVDNIYRYTLAGTEVSALLGRIPSAVGYQPTLSEEMGILQERITSTKSGSITSVQAIYVPADDLTDPSPATTFVHLDATVVLSRQIASLGIYPAIDPLDSTSRQLDPLIVGEDHYLVARKIQSILQRYKDLKDIIAILGIDELSEEDKILVSRARKIQRFLSQPFFVAEIFTGFSGKYVTLKDTIDGFNSIINGEYDYIPEQAFYMTGNISDVLDKYKKFYS

SEQ ID NO: 608 - protein, 498 aa, Degeneria vitiensis
MRINPTTSGSGVSTLEEKNLGRIAQIIGPVLDVAFPPGKMPNIYNALVVKGRETVGQQINVTCEVQQLLGNNRVRAVAMSATDGLMRGMEVIDTGAPLSVPVGGATLGRIFNVLGEPVDNLGPVDTRTTSPIHRPAPAFIQLDTKLAIFETGIKVVDLLAPYRRGGKIGLFGGAGVGKTVLIMELINNIAKAHGGVSVFGGVGERTREGNDLYMEMKESGVINEQNIAESKVALVYGQMNEPPGARMRVGLTALTMAEYFRDVNEQDVLLFIDNIFRFVQAGSEVSALLGRMPSAVGYQPTLSTEMGSLQERITSTKEGSITSIQAVYVPADDLTDPAPATTFAHLDATTVLSRGLAAKGIYPAVDPLDSTSTMLQPRIVGEEHYETAQRVKQTSQRYKELQDIIAILGLDELSEEDRLTVARARKIERFLSQPFFVAEVFTGSPGKYVGLAETIRGFQLILSGELDGLPEQAFYLVGNIDEATAKAMNLEVESNLKK

SEQ ID NO: 609 - protein, 261 aa, Neisseria meningitidis MC58
MSRIRQAFAALDGGKALIAYITVGDPDIRTTLALMHGMVANGADILELGVPFSDPMADGPVIQRAAERALANGISLRDVLDVVRKFRETDTQTPVVLMGYLNPVHKMGYREFAQEAAKAGVDGVLTVDSPVETIDPLYRELKDNGVDCIFLIAPTTTEDRIKTIAELAGGFVYYVSLKGVTGAASLDTDEVSRKIEYLHQYIDIPIGVGFGISNAESARKIGRVADAVIVGSRIVKEIENNTGNEAAAVGALVKELKDAVR

SEQ ID NO: 610 - protein, 482 aa, Poncirus trifoliata
  unsure (1)..(482): unsure at all Xaa locations
GVSXLANXNLXHIAQIIGPVLDVAFPPGKMPNIYNALVVKGRDTVDQPINVTCEVQQLLGNNRVRAVAMSATDGLTRGMEVIDTGAPLSVPVGGVTLGRIFNVLGEPVDNLGPVDTRTTSPIHKSAPAFIQLDTRLSIFETGIKVVDLLAPYRRGGKIGLFGGAGVGKTVLIMELINNIAKAHGGVSVFGGVGERTREGNDLYMEMKESGVINDQNLSESKVALVYGQMNEPPGARMRVGLTALTMAEYFRDVNEQDVLLFIDNIFRFVQAGSEVSALLGRMPSAVGYQPTLSTEMGSLQERITSTKEGSITSIQAVYVPADDLTDPAPATTFAHLDATTVLSRGLAAKGIYPAVDPLDSTSTMLQPRIVGEEHYETAQRVKQTLQRYKELQDIIAILGLDELSEEDRLTVARARKIERFLSQPFFVAEVFTGSPGKYVGLAETIRGFKLILSGELDGLPEQAFYLVGNIDEVTAKATNLEM

SEQ ID NO: 611 - protein, 487 aa, Hordeum vulgare subsp. vulgare
MNQSGMARSDEGSLVPREVPGSYGLPFVSAIRDRLDFYYFQGQDKYFESRVEKYGSTVVRINVPPGPFMARDPRVVAVLDAKSFPVLFDVTKVEKKNLFTGTYMPSTSLTGGFPVCSYLDPSEPTHTKVKQLLFSLLASRKDAFIPAFRSHFSSLLATVESQLLLSGKSNFNTLNDATSFEFIGDGYFGVLPSASDLGTTGPAKAAKWLIFQLHPLVTLGLPMILEEPLLHTVHLPPFLVSGDYKALYKYFFAAATKALDTAEGLGLKRDEACHNLLFATVFNSYGGLKVLLPGILARIADSGEKFHKKLVTEIRAAVAEAGGKVTIEALEKMELTKSAVWEALRLDPAVKFQYGRAKADMNIESHDAVFAVKKGEMLFGYQPCATKDPRVFGPTAREFVGDRFVGKEGSKLLKYVYWSNGRETESPSVHNKQCPGKNLVVLVGRLLVVELFLRYDTFTAKVGLDLLGTKVEFTGVTKATSGVADAV

SEQ ID NO: 612 - protein, 591 aa, Saccharomyces cerevisiae
RISLEDHAESEYGAIYSVSGPVVIAENMIGCAMYELVKVGHDNLVGEVIRIDGDKATIQVYEETAGLTVGDPVLRTGKPLSVELGPGLMETIYDGIQRPLKAIKEESQSIYIPRGIDTPALDRTIKWQFTPGKFQVGDHISGGDIYGSVFENSLISSHKILLPPRSRGTITWIAPAGEYTLDEKILEVEFDGKKSDFTLYHTWPVRVPRPVTEKLSADYPLLTGQRVLDALFPCVQGGTTCIPGAFGCGKTVISQSLSKYSNSDAIIYVGCGERGNEMAEVLMEFPELYTEMSGTKEPIMKRTTLVANTSNMPVAAREASIYTGITLAEYFRDQGKNVSMIADSSSRWAEALREISGRLGEMPADQGFPAYLGAKLASFYERAGKAVALGSPDRTGSVSIVAAVSPAGGDFSDPVTTATLGITQVFWGLDKKLAQRKHFPSINTSVSYSKYTNVLNKFYDSNYPEFPVLRDRMKEILSNAEELEQVVQLVGKSALSDSDKITLDVATLIKEDFLQQNGYSTYDAFCPIWKTFDMMRAFISYHDEAQKAVANGANWSKLADSTGDVKHAVSSSKFFEPSRGEKEVHGEFEKL

SEQ ID NO: 613 - protein, 242 aa, Petunia x hybrida
  unsure (1)..(242): unsure at all Xaa locations
MEFQSDLTREISPQRKLGRGKIEIKRIENTTNRQVTFCKRRNGLLKKAYELSVLCDAEVALIVFSSRGRLYEYANNSVKATIERYKKACSDSSNTGSIAEANAQYYQQEASKLRAQIGNXQNQNRNFLGESLAALNLRDLRNLEQKIEKGISKIRAKKNELLFAEIEYMQKREIDLHNNNQYLRAKIAETERSQQMNLMPGSSSYDLVPPQQSFDARNYLQVNGLQTNNHYPRQDQPPLQLV

SEQ ID NO: 614 - protein, 226 aa, Pirellula sp.
MKSGANMHLRGVALDMDGLLFDTERIYFQVGQVLMERRGHTFTLELQQKMMGRVGLSAVGQMIDHHQLDDDPVSLLAESDDVYGDLLLGELRPMPGLAEWIERLRTSGLPFGLATSSRRKFVDMILPTTEWSDDLAFALTGDDVTHGKPNPEMYLKAADRLRVSPTEMLVLEDSGNGSKAAVSAGAVTVAVPNEHTRSHVFEDVHLVAESLADPRLWELLPQNTNA

SEQ ID NO: 615 - protein, 847 aa, Arabidopsis thaliana
MELDDLDLSGSWPLDQITFASNFKSPVIFSSSEQPFSPLWSFSETSGDVGGELYSAAVAPTRFTDYSVLLASSESETTTKENNQVPSPSWGIMPLENPDSYCAIKAKMTQALRYFKESTGQQHVLAQVWAPVKNRGRYVLTTSGQPFVLGPNSNGLNQYRMVSLTYMFSLDGERDGELGLPGRVFRKKLPEWTPNVQYYSSKEFSRLGHALHYNVQGTLALPVFEPSRQLCVGVVELIMTSPKINYAPEVEKVCKALEAVNLKTSEILNHETTQVICESNICNEGRQNALAEILEILTVVCETYKLPLAQTWVPCRHRSVLAFGGGFKKSCSSFDGSCMGKVCMSTSDLAVYVVDAHVWGFRDACAEHHLQKGQGVAGRAFQSGNLCFCRDVTRFCKTDYPLVHYARMFKLTSCFAVCLKSTYTGDDEYVLEFFLPPAITDKSEQDCLLGSLLQTMKQHYSSLKVVSETELCENNMSLEVVEASEDGMVYSKLEPIRIHHPAQISKDYLELNAPEQKVSLNSDFMENNEVDDGVERFQTLDPIPEAKTVKKSERKRGKTEKTISLEVLQQYFAGSLKDAAKSLGVCPTTMKRICRQHGISRWPSRKINKVNRSLTRLKHVIDSVQGADGSLNLTSLSPRPWPHQIPPIDIQLAKNCPPTSTSPLSNLQDVKIENRDAEDSAGSSTSRASCKVNPICETRFRLPTHNQEPSRQVALDDSDSSSKNMTNFWAHLTCQDTASPTILQHKLVSIKATYREDIIRFKISPESVSITELKQQVAKRLKLETAAFELKYLDDDREWVSVSCDADLSECLDTSAAKANTLRLSVHDVTFNFGSSCESSEETMMCL

SEQ ID NO: 616 - protein, 707 aa, Pseudomonas putida KT2440
MLFFHGKQIFSAIFDMDGTLFDTERLRFRTLKQASLEIFGKALSEQTLIGSLGLSAKKAEALAKAHNGEDFPYAQIRQRADELELEYVRNHGVPIKAGLLEVLERLRKSGLTMAVATSSRRAIAEEYLINANVLKYFDITVCGDEVGQGKPHPEIFLKAARALNCEPGQCFMVEDSENGMLSAMRAEGQAILIEDIKPPAPEIKAGALKAYRSMHEFLADLSECVPDLGMPALSEPFPASMNQFSVGIHGFGAIGGGYLTQVFSHWDGYTRPREIIAATRSRMLRESVSAFGRYSVRYGATSFDQTIDNVRMIDMDDDDAVISMYTTAEIIGLSLPEQAIRSQARVIAQGLLQRFERRGRELTLLIVLNKVGGAAFVRRHVQAELSLLCPPAISEQVLQKTHFAETVVSRIVSKLGNDALVRQLRIKSQMFQNSLEDEPASTRKSSTPLPEYERLIGHFRPFAQPSSAMSQLHLVLFNSEADMPLYAERGSDLLERLRQVKTVPDIAQIQIIKNRLWNGPHAIVAWYASLLGHAWVGQGMGDARVSELAERLIRQEVAPALVAEYPQMAEVVSRFAEAFLERCKTSFKDPCARVGRDPLRKLQRNERILSSIDLARKHGIATPALAFGAGLAIHHALNCSNSKDLESQAIRQVYLDNQESVEAVLTHANKPFPGLCPVKDAELIAAIREGFRQLPQPAPRHAVAVGS

SEQ ID NO: 617 - protein, 217 aa, Clostridium tetani E88
MFQDIKAAIFDMDGTLIDSMWVWEKIDIDYLKKRNIPVPKNLSESIAHLTFEESAQYFKNKFNLKDNIKTIMDEWNNMAYYEYVHNVKLKNGALDFLMLLKNKGIKLGLATSNCDMLLKIALKNNGIYDIFDCITTSDEVNKSKEFPDIYLLCAERLNISPKHCIVFEDILPAIRGAKSAGMKVVGVHDMSAKNQKKEIIKNADFYILEYNELIKAV

SEQ ID NO: 618 - protein, 224 aa, Cycas edentata
MGRGKIEIKRIENTTNRQVTFCKRRNGLLKKAYELSVLCDAEVALIVFSSRGRLYEFANNSVKRTIERYKKTCADNTQGGAISESNSQYWQQEAGKLRQQIDILQNANRHLMGDALTSLSVKELKQLEIRLERGLSRVRSKKNEMLLEEIEIMQRREHILLAENQFLRTKIAEYESNQNTNVLIPGPEFDALPAFDSRNFLHANLIEAAAHHYTQQDQAALQLG

SEQ ID NO: 619 - protein, 422 aa, Magnetospirillum magnetotacticum
MTKSTSGESKNTLYCSFCGKSQHEVRKLIAGPTVFICDECVELCMDIIREEHKTHLVRSRDGVPTPKDICQVLDDYVIGQGHAKKVLSVAVHNHYKRLQHGGKNNNEVELAKSNILLIGPTGCGKTLLAQTLARILDVPFTMADATTLTEAGYVGEDVENIILKLLQAAEYNVERAQRGIVYIDEVDKISRKSDNPSITRDVSGEGVQQALLKIMEGTVASVPPQGGRKHPQQEFLQVDTTNILFICGGAFSGLEKIIGSRGRGTSIGFGADVRGPDERRTGEILREVEPEDLLKFGLIPEFVGRLPVLATLEDLDVDALIDILSKPKNALVKQYQRLFEMEDTRLSFSDDALKAIAEKAIARKTGARGLRSIMETILLDTMFDLPGLDAVDEVVINKEVVEGRAKPLYIYSERREDVGSSA

SEQ ID NO: 620 - protein, 85 aa, Oryza sativa
  unsure (1)..(85): unsure at all Xaa locations
XLLYGFQLDPSCSLEVVGELIARETTGPRRNPMNGGLVDPLLIHARENLDLRLDFHCDDANTMITITLEDLEAGLKQISKQRQLQ

SEQ ID NO: 621 - protein, 340 aa, Sambucus nigra
MVAALVLIGLLMPTLQIAGAQSVGVCYGQKGNNLPSQRDVVNLYKKYGIRRMRVYDPAEPILQALRGKSIEIILDVPNSDLQNLASNPSAAVTWVQNNIRNYSRDVRFRYIAVGNEVDPYNENVQYISFVLPTMRNVHDAIVAAGLQGQIKVSTATYTGVLIVTSPPSAGLYRPNVRSFIDPIINFLVQNNLPLLVNVYPHIAITGNSDIQLPYALFTAPGVVVTDSDRNLEYRNLFVAILDAHYAALEKAGGPNVEIVVSESGWPTQGHPVATIDNAKTYNNNLIRHVKGRSGTPRRPGRDIETYIFAMFDETQKPSDMARHFGLFSPNQKLIYPISFK

SEQ ID NO: 622 - protein, 242 aa, Shigella boydii
LKERKEGAFVPFVTLGDPGIEQSLKIIDTLIEAGADALELGIPFSDPLADGPTIQNATLRAFAAGVTPAQCFEMLALIRQKHPTIPIGLLMYANLVFNKGIDEFYAQCEKVGVDSVLVADVPVEESAPFRQAALRHNVAPIFICPPNADDDLLRQIASYGRGYTYLLSRAGVTGAENRAALPLNHLVAKLKEYNAAPPLQGFGISAPDQVKAVIDAGAAGAISGSAIVKIIEQHINEPEKML

SEQ ID NO: 623 - protein, 212 aa, Oryza sativa
  unsure (1)..(212): unsure at all Xaa locations
MARKQHIAIFTTASLPWMTGTAVNPLFRAAYLAKAGDWEVTLVVPWLSKGDQLLVYPNKMKFSVPGEQEGYVRRWLEERIGLLPKFEIKFYPGKVIRLSAATQEVPRSIVCNVHGVNPKFIEIGKLKHQQISQREQAFFKGAYYIGKMVWSKGYTELLQLLQKHQKELSGLKMELYGSGEDSDEVKASAEKLNLDVRVYPGRDHGDSIFHEX

SEQ ID NO: 624 - protein, 496 aa, Heliconia paka
MRTNPTTSSPVVSTLEEKNLGRIAQIIGPVLDVVFPPGKMPNIYNALVVKGRDTVGQQINVTCEVQQLLGNNRVRAVAMSATDGLTRGMGVIDTGAPLSVPVGGATLGRISNVLGEPVDNLGPVDTSTTSPIHRPAPAFIQLDTKLSIFETGIKVVDLLAPYRRGGKIGLFGGAGVGKTVLIMELINNIAKAHGGVSVFGGVGERTREGNDLYMEMKESGVINEKNIAESKVALVYGQMNEPPGARMRVGLTALTMAEYFRDVNEQDVLLFIDNIFRFVQAGSEVSALLGRMPSAVGYQPTLSTEMGSLQERITSTKEGSITSIQAVYVPADDLTDPAPATTFAHLDATTVLSRGLAAKGIYPAVDPLDSTSTMLQPRIVGEEHYETAQRVKQTSQRYKELQDIIAILGLDELSEEDRLTVARARKIERFLSQPFFVAEVFTGSPGKYVGLAETIRGFQLILSGELDSLPEQAFYLVGNIDEATAKAMNLEGESKL

SEQ ID NO: 625 - protein, 475 aa, Mycoplasma pulmonis
MSQKNVGKIVQILGPVVDISFAGQKIPAIYNNLELVFENNKYNFEVAQHIGDEVVRTISMVSTNGLSRGLEVIDTGAPIMVPVGKEVLSRMFNVLGQTIDNKGEIEAKEFRSIHASAPSYEEQNDSSEILETGIKVIDLLVPYSKGGKIGLFGGAGVGKTVLVQELINNIATQHGGLSVFAGVGERTREGNDLYHEMIASGVLDKTTLVFGQMNEPPGARMRVALTGLTMAEYFRDKFKQDVLLFIDNIFRFTQAGSEVSALLGRMPSAVGYQPTLATEMGQLQERITSTKNGSITSVQAVYVPADDLTDPAPATTFTHLDAKTVLERNIAALGIYPAIDPLASSSRMLDPLIIGNEHYLVALEVQNILQRFKELQDIIAILGIGELSEEDKKLVFRARKIRNFLSQPFTVAEKFSGKKGKFVPLKETIRSFKEILEGKHDNLPEDAFLYVGSIDEAIEKAKGQSNATTANNNNA

SEQ ID NO: 626 - protein, 469 aa, Listeria monocytogenes EGD-e
MTNLTLRNQLTPKQIVEKLDQYIIGQNGAKKSVAVALRNRYRRQLMDESIRDEIIPKNILMIGPTGVGKTEIARRIAKIVRAPFSKVEATKFTEVGYVGRDVESMVRDLVEVSVRLVKEEKMQLVRVKAEKNAEKRLIKLLAPSQKKKQTTSQNPLEALFGGMNQPDESPEEEVDQELKNKRSQIEWRLQNGELDDEIVTVEVKEQQNPMLDMMRGAGMDQMNGMQDALSGMFPAKKKKRKVTVREAKKILFEDEASKLIDADELAAEGIHRAEQMGMIFIDEIDKIASKEGGGNAQVSREGVQRDILPIVEGSQISTKYGTVNTEYILFIAAGAFHMSKPSDLIPELQGRFPIRIELDKLTQEDFYKILTEPDNALIKQYKALLKTEGIDLIFTKEAVERIAEIAFQVNQDSDNIGARRLHTILEKLLEDLLFEAPEINMESIKVTENYVNEKLAPIMQNKDLTQFIL

SEQ ID NO: 627 - protein, 268 aa, Escherichia coli O157:H7 EDL933
MERYESLFAQLKERKEGAFVPFVTLGDPGIEQSLKIIDTLIEAGADTLELGIPFSDPLADGPTIQNATLRAFAAGVTPAQCFEMLALIRQKHPTIPIGLLMYANLVFNKGIDEFYAQCEKVGVDSVLVADVPVEESAPFRQAALRHNVAPIFICPPNADDDLLRQIASYGRGYTYLLSRAGVTGAENRAALPLNHLVAKLKEYNAAPPLQGFGISAPDQVKAAIDAGAAGAISGSAIVKIIEQHINEPKKMLAALKAFVQPMKAATRS

SEQ ID NO: 628 - protein, 261 aa, Neisseria meningitidis Z2491
MSRIRQAFAALDGGKALIPYITVGDPDIRTTLALMHGMVANGADILELGVPFSDPMADGPVIQRAAERALANGISLRDVLDVVRKFRETDTQTPVVLMGYLNPVHKMGYREFAQEAAKAGVDGVLTVDSPVETIDPLYRELKDNGVDCIFLIAPTTTEDRIKTIAELAGGFVYYVSLKGVTGAASLDTDEVSRKIEYLHQYIDIPIGVGFGISNAESARKIGRVAEAVIVGSRIVKEIENNAGNEAAVVGALVKELKDAVR

SEQ ID NO: 629 - protein, 477 aa, Coxiella burnetii RSA 493
MLRSTKIIATLGPATDDLSILEEIIHEGVDIIRLNFSHGTHEKHKQRIEMVRKAAKKQERVIGILADLQGPKIRISSFKTGKINLKKGELFILDAGLPPEEGTEKSVGIDYKNLPKDVKAEDILLLDDGRLTLKVQNVKGEQIICRVVEGGALSDHKGINRLGGGLSAEAMTEKDINDLKFAVDFDVDYVAISFPRDAQDILKAKHLVQGYKGKAGIIAKIERTEAVKNIDAIIEASDGVMVARGDLAVEIGDAQVPLVQKDIIHRARSMDKPVIIATQMMESMIHATVPTRAEVSDVANAVLDNTDAVMLSAETAVGDYPVLAVAAMARTCVVSESQPRSHISRHRVECRFKRIDEAIAMATMYAANHLDIKAIITLTESGITPLWMSRIRTAIPIYGLSRFDKSLGRMTLYRGVYPIKFDPTQYTRDEINVKAVETLQSQDLLKNGDLVVLTKGDYMGVGGGSNAMKIMVVGKVV

SEQ ID NO: 630 - protein, 106 aa, Malus x domestica
YALFTAPSVLVQDGQRGYRNLFDAILDAVYAALDKVGGGSLEIVISESGWPTAGGTATTVDNARTYNSNLVQHVKGGTPRKPGRPIETYIFAMFDENRKTPELEKH

SEQ ID NO: 631 - protein, 526 aa, Triticum aestivum
  unsure (1)..(526): unsure at all Xaa locations
MAGSVLQGNYVQVYVMLPXLDAVSVNNRFEKGDELRAQLKRLVEAGVDGVMVDVWWGLVEGKGPRAYDWSAYKQLFQLVHEAGLKLQAIMSFHQCGGNVGDVVNIPIPQWVRDVGASDPDIFYTDQHGTRNIEYLTLGVDDQPLFHGRSAVQMYADYMASFRDNMKEFLDAGVIVDIEVGLGPAGELRYPSYPQSHGWSFPGIGEFICYDKYLQADFKAAAAMVGHPEWEFPHDAGTYNDTPERTRFFVDNGTYLTEQGRFFLAWYSNNLIKHGDKILDEANKVFLGHRVQLAIKISGIHWWYKAPSHAAELTAGYYNLHDRDGYRPIARMLKRHHASLNFTCAEMRDSEQSSQARSAPEELVQQVLSAGWREGLNVACENALPRYDPTAYNTILRNARPHGINKSGPPEHKLFGFTYLRLSNQLVEGQNYVNFKTFVDRMHANLPHDPCVDPVAPLQRSGPELTIEMILQAAQPKLDPFPFEEHTDLPVQGLGGIGGDVEGPTGGMGGEVQDPTGSMGGELPATV

SEQ ID NO: 632 - protein, 384 aa, Arabidopsis thaliana
MDLVDKRDVLIGDFRPSLGFYGGVRVGVYLDTTEPKHAKIKGFAMETLKRSSKVWLQELRSNLNIFWGTIESEISKNGAASYIFPLQRCIFSFLCASLAGVDASVSPDIAENGWKTINTWLALQVIPTAKLGVVPQPLEEILLHTWPYPSLLIAGNYKKLYNFIDENAGDCLRLGQEEFGLTRDEAIQNLLFVLGFNAYGGFSVFLPSLIGRITGDNSGLQERIRTEVRRVCGSGSDLNFKTVNEMELVKSVVYETLRFSPPVPLQFARARKDFQISSHDAVFEVKKGELLCGYQPLVMRDANVFDEPEEFKPDRYVGETGSELLNYLYWSNGPQTGTPSASNKQCAAKDIVTLTASLLVADLFLRYDTITGDSGSIKAVVKAK

SEQ ID NO: 633 - protein, 496 aa, Aloe vera
  unsure (1)..(496): unsure at all Xaa locations
MRTNPTTSGPAVSTLEEKNLGRIAQIIGPVLDVVFPPGKMPNIYNALVVKGRDTVGQQINVTCEVQQLLGNNRVRAVAMSATDGLTRGMEVINTGAPLSVPVGGATLGRIFNVLGEPVDNLGPVDTRTTSPIHRSAPAFIQLDTKLSIFETGIKVVDLLAPYRRGGKIGLFGGAGVGKTVLIMELINNIAKAHGGVSVFGGVGERTREGNDLYMEMKESGVIXEKNIAESKVALVYGQMNEPPGARMRVGLTALTMAEYFRDVNEQDVLLFIDNIFRFVQAGSEVSALLGRMPSAVGYQPTLSTEMGSLQERITSTKEGSITSIQAVYVPADDLTDPAPATTFAHLDATTVLSRGLAAKGIYPAVDPLDSTSTMLQPRIVGEEHYETAQRVKETLQRYKELQDIIAILGLDELSEEDRLTVARARKIERFLSQPFFVAEVFTGSPGKYVGLAETIRGFQLILSGEFDGLPEQAFYLVGNIDEATAKAMNLEEESKL

SEQ ID NO: 634 - protein, 414 aa, Neisseria meningitidis MC58
MSNENRTCSFCGKSKSHVKHLIEGENAFICDECVSNCIEILHEDGNDGTPSESAGGEPEESGKLPTPAEIVANLNDHVIGQEQAKKALAVSVYNHYKRLRHPKAGANVELSKSNILLIGPTGSGKTLLAQSLARKLDVPFVMADATTLTEAGYVGEDVEQIITKLLGKCDFDVEKAQRGIVYIDEIDKISRKSDNPSITRDVSGEGVQQALLKLIEGTVASVPPQGGRKHPNQEFINVDTTNILFICGGAFAGLEKVIRQRTEKGGIGFGASVHSKDENADITKLFGIVEPEDLIKFGLIPELIGRLPVIATLEELDEDALINILTEPKNALVKQYQALFGMENVELEFEEGALRSIARQAMERKTGARGLRSIVERCLLDTMYRLPDLKGLKKVVVGKAVIEEGREPELVFES

SEQ ID NO: 635 - protein, 242 aa, Shigella dysenteriae
LKERKEGAFVPFVTLGDPGIEQSLKIIDTLIEAGADALELGIPFSDPLADGPTIQNATLRAFAAGVTPAQCFEMLALIRQKHPTIPIGLLMYANLVFNKGIDEFYAQCEKVGVDSVLVADVPVEESAPFRQAALRHNVAPIFICPPNADDDLLRQIASYGRGYTYLLSRAGVTGAENRAALPLNHLVAKLKEYNAAPPLQGFGISAPDQVKAAIDARAAGAISGSAIVKIIEQHINEPEKML

SEQ ID NO: 636 - protein, 224 aa, Streptococcus pneumoniae
MPKTLTEKLNAIKVTGKGIFVPYIMAGDHEKGLDGLAETIHFLEDLGVSAIEVGIPFSDPVADGPVIEEAGLRSLAHGTSTQALVETLKTIETEIPLVIMTYFNPLFQYGVENFVKDLADTAVKGLIIPDLPHEHANFVEPFLADTDIALIPLVSLTTGIERQKELIEGAEGFVYAVAINGVTGKSGNYRADLDKHLAQLHQVADIPVLTGFGVSSQADLERFN

SEQ ID NO: 637 - protein, 527 aa, Oryza sativa (japonica cultivar-group)
MEVAMVCTRVNLLILILSLCSPYKFIQSPMDFGPLNLLPTTTTASSDFGRILFHSPSAVLKPQAPRDISLLLSFLSASPLGKVTVAARGAGHSIHGQAQALDGIVVEMSSLPSEIEFYRRGEGDVSYADVGGGIMWIELLEQSLKLGLAPRSWTDYLYLTIGGTLSNAGISGQTFKHGPQISNVLQLEVVTGRGEIVTCSPTKDAELFNAVLGGLGQFGIITRARILLQEAPQKVKWVRAFYDDFATFTKDQELLVSMPVLVDYVEGFIVLNEQSLHSSSIAFPTNVDFNPDFGTKNNPKIYYCIEFAVHDYQNKNINVEQVVEVISRQMSHIASHLYSVEVSYFDFLNRVRMEEMSLRNSGLWEVHHPWLNMFVPSAGISDFRDLLMDSISPDNFEGLILIYPLLRHKWDTNTSVVLPDSGSTDQVMYAVGILRSANPDDGCSHHCLQELLLRHRRLAGAAASGLGAKQYLAHHPTPAGWRRHFGRRWERFADRKARFDPRCILGPGQGIFPRDSSSSNGAFASYS

SEQ ID NO: 638 - protein, 479 aa, Haemophilus somnus 2336
MSRRLRRTKIVCTLGPSTDRGNNLEKIIVAGANVVRMNFSHGTPEDHLARAEKVREIAKKLGKTVAILGDLQGPKIRVSTFKEGKIFLNIGDNFTLDADLPKGEGNQEAVGLDYKTLPQDVVPGDILLLDDGRVQLKVLSTDNTKVFTEVIVGGPLSNNKGINKLGGGLSANALTEKDKEDIILAARIGVDYLAVSFPRSSADLNYARELAQQAGLKAKIVAKVERAETVIDDEAMDDIILASDVIMVARGDLGVEIGDPELVGIQKKLIRRSRQLNRVVITATQMMESMISNPMPTRAEVMDVANAVLDGTDAVMLSAETAAGQYPSETVSAMAKVCLGAEKMPSVNISRHRLDKEFDTIEETIAMSTMFAANHMKGVAAIIAMTSSGHTAKLMSRISSGLPIFALSRNESTLNLCALYRGVIPIHFDQDSRTLEGLKAAIQSLKDKGYLVSGDLVLLTQGDHLTSNGTTTCRALVVE

SEQ ID NO: 639 - protein, 324 aa, Brassica napus
MTNVTGDRNGDGRSTAVTESSPPSDPPIRVYADGIYDLFHFGHARSLEQAKKSFPNTYLLVGCCNDDTTHKYKGKTVMNDQERYESLRHCKWVDEVIPDAPWVINQEFLDKHRIAYVAHDALPYADASGAGKDVYEFVKKVGRFKETKRTEGISTSDIIMRIVKDYNQYVMRNLDRGYSREDLGVSFVKRLRVNMRLKKLQEKVKEQQEKVGEKIQTVKMVRNEWVENADRWVAGFLEMFEEGCHKMGTAIRDRIQEKLMRQESKELLEKGQNGQREDTEEQFYEEYFEHDIVDSCEDNEDDEEEYYDEIEEQCSSASKALKSN

SEQ ID NO: 640 - protein, 500 aa, Streptococcus pyogenes M1 GAS
MNKRVKIVATLGPAVEIRGGKKYGEDGYWAGQLDVEESAKKIAELIEAGANVFRFNFSHGDHKEQGDRMATVRLAEEIARQKVGFLLDTKGPEMRTELFADDAKEFSYVTGEKIRVATTQGIQSTRDVIALNVAGSLDIYDEVEVGHTILIDDGKLGLKVIDKDIATRQFIVEVENDGIIAKQKGVNIPNTKIPFPALAERDNADIRFGLEQGLNFIAISFVRTAKDVEEVREICRETGNDHVQLFAKIENQQGIDNLDEIIEAADGIMIARGDMGIEVPFEMVPVFQKMIITKVNAAGKAVITATNMLETMTEKPRATRSEVSDVFNAVIDGTDATMLSGESANGKYPVESVRTMATIDRNAQTLLNEYGRLDSSAFPRTNKTDVIASAVKDATHSMDIKLVVTITETGNTARAISKFRPDADILAVTFDEKVQRALMINWGVIPVLAEKPASTDDMFEVAERVAVEAGLVQSGDNIVIVAGVPVGTGGTNTMRVRTVK

SEQ ID NO: 641 - protein, 322 aa, Bifidobacterium longum DJO10A
MVRLPDRRSGRRARCGRRPRQYCRLNKKRRFLIMTNEATTPSGQPLGISHKPSKSVAMFTKFKAENKPAFIGYLPYGFPNPDVSLDAFKTMVEHGVDAVEIGLPYSDPVMDGPVIQAAASIALNNGETIKRVFEAVETVANAGGVPLIMSYWNLVYHYGVERFARDFENAGGAGLITPDLIPDEAGEWIEASDRHGLDRIFLVSPDSSTERLETVARNARGFVYAAARMGVTGERATIDASPELLVERTRQAGAENVCVGIGVSTAEQGAKVGSYADGVIVGSALVHTLLADDNKTARDPKEGLKLLAAKSEELAEGIHNAR

SEQ ID NO: 642 - protein, 719 aa, Elaeis guineensis
EIPYNIGFLQVATLSLQGNRLTGKIPEVIGLMQALAVLDLSENELVGTIPPILGNLSYTGKLYLHGNKLTGPIPPELGNMTKLSYLQLNDNKLVGTIPAELGKLEELFELNLANNNLEGPIPQNISLCTALNKFNVHGNRLNGSIPLQFQKLESLTYLNFSSNNFKGKVPWELGRIINLDTLDLSNNHFSGPIPDSIGDLEHLLELNLSRNNLNGPLPTEFGNLRSGQTIDISYNKLSGPIPEELGQVQTIDTLILNNNDLYGEIPVQLTNCFSLSSLNLSFNNFSGDVPLSKNFSRFPQESFLGNPMLCGNWLGSSCGQDLHGSKVTISRAAVVCITLGCITLLSMMLVAIYKSSQPKQFIKGSNRTVQGPPKLVVLRMDMAIHTYEDIMRITENLSEKYIIGYGASSTVYKCVLKNSKPIAIKRLYSQYPHNLHEFETELETIGSIRHRNLVSLHGYSLSPHGNLLFYDYMENGSLWDLLHGPSKKVKLDWDTRLKIAVGAAQGLAYLHHDCNPRIIHRDVKSSNILLDENFEAHLSDFGIAKCIPAAKTHASTYVLGTIGYIDPEYARTSRLNEKSDVYSFGIVLLELLTGKKAVDNDSNLHQLILSKADDNTVMEAVDFEVRSPAWIWGCQKAFQLAICAQRSDRPTMHEVARVLVSLLPVPSLKPGLVPQKPMDYAHYLAAGPDVKIKRTHDDNSSSDGQWFLRFGEVISKNTL

SEQ ID NO: 643 - protein, 261 aa, Vicia faba
AHIITAVIGSGVLSLAWAIAQLGWIAGPSMMLLFSFVTYYTSTLLSACYRTGDQLNGKRNYTYTDAVRAYLGGFKVKICGLVQYVNLFGVAIGYTIAASISMMAIKRSNCFHSSGGKDPCHMNGNLYMISFGIVEIFFSQIPDFDQLWWLSTLAAVMSFTYSTIGLGLGVGKVIENKGIKGSLTGITVGTVTQTQKVGRSFQALGNIAFAYSYSMILIEIQDTIKSPPSESKTMKAATLISVVVTTIFYMLCGCLGYAAFG

SEQ ID NO: 644 - protein, 268 aa, Escherichia coli
MERYESLFAQLKERKEGAFVPFVTLGDPGIEQSLKIIDTLIEAGADALELGIPFSDPLADGPTIQNATLRAFAAGVTPAQCFEMLALIRQKHPTIPIGLLMYANLVFNKGIDEFYAQCEKVGVDSVLVADVPIEESAPFRQAALRHNVAPIFICPPNADDDLLRQIASYGRGYTYLLSRAGVTGAENRAALPLNHLVAKLKEYNAAPPLQGFGISAPDQVKAAIDAGAAGAISGSAIVKIIEQHINEPEKMLAALKVFVQPMKAATRS

SEQ ID NO: 645 - protein, 489 aa, Methanosarcina acetivorans C2A
MNINVNINGRENMQIPDHKTKIVCTIGPASFSEEVLRKLVLAGMNVARINFSHGDFESHGKVIRRVRKVAEELDRTVAILADLPGPKIRVGKLKKEPLMLHKGNRITLTTDETSGSEDRIPVNYKQLPESVSPGSLIYLSDGFIQLLCLEISGKDVVCEVMVGGQLYSHKGLNLPGAKIYLDSVTEHDFKILEFALNEEVDAVSISFVEKAEDIRKVRNFASTMGKPVYVVSKIERSQAVQNIEEILEETDALMVARGDLGVEIPIQEVPSVQKELIRSAKLLSIPVITATHMLASMTDNIRPTRAEATDVANAILDGTDAVMLSEETAVGNYPVETVEMMAKIAKTTENWRSRTKWGLDTMLKGITAQKMSVDEVIALQVHEALQKLPVAVVLTPTRSGATPRRLSRFKPEPWILAFTRFPKTCSSLALSYGVYPIIVKEVSENWETETTEKAKELGFAKSGELVVFTQGPASGKPGGTNMLKILTLD

SEQ ID NO: 646 - protein, 486 aa, Jacquemontia reclinata
PTTSSSDVSAVEKKNLGRIVQIIGPVLDVAFPPGKMPNIYNALVVQGRDNEQTNVTCEVQQLLGNNRVRTVAMSDTDGLMRGMDVIDMGAPISVPVGGSTLGRIFNVLGEPVDNLGPVDTKITSPIHRSAPAFTQLDTKLSIFETGIKVVDLLAPYRRGGKIGLFGGAGVGKTVLIMELINNIAKAHGGVSVFGGVGERTREGNDLYMEMKESGVINEEKIAESKVALVYGQMNEPPGARMRVGLTALTMAEYFRDVNEQDVLLFIDNIFRFVQAGSEVSALLGRMPSAVGYQPTLSTEMGTLQERITSTKEGSITSIQAVYVPADDLTDPAPATTFAHLDATTVLSRGLAAKGIYPAVDPLDSTSTMLQPRIVGKEHYETAQRVKQTLQRYKELQDIIAILGLDELSEEDRLTVARARKIERFLSQPFFVAEVFTGSPGKYVGLVETIRGFQLILSGEFDSLPEQAFYLVGNIDEATAKAMNLKT

SEQ ID NO: 647 - protein, 582 aa, Deinococcus radiodurans
MTQQKQGVVQSIAGPAVIAKGMYGAKMYDIVRVGQERLVGEIIRLDGDTAFVQVYEDTAGLTVGEPVETTGLPLSVELGPGMLNGIYDGIQRPLDKIREASGNFIARGIEVSSLNREQKWDFTPSVQAGDTVTGSGILGTVPEFSFTHKILVPPEVQGRLRSVAPAGQYTIDDTIAELEDGTKLRLAHYWPVRAPRPVQKKLDPSLPFLTGMRILDVMFPLVMGGAAAIPGPFGSGKTVTQQSVAKYGNADIVVYVGCGERGNEMTDVLVEFPELEDPKTGGPLMHRTILIANTSNMPVAAREASVYTGVTLAEYFRDQGYSVSLMADSTSRWAEALREISSRLEEMPAEEGYPPYLGAKLAAFYERAGAVKTLAGEDGAVSVIGAVSPAGGDMSEPVTQATLRITGAFWRLDAGLARRRHFPAINWNGSYSLFTPILDKWYRENVGPDFPELRQRIGSLLQQEAALQEVVQLVGPDALQDNERLIIETGRMLRQDFLQQNGFDPVDASASMPKNYGLMKMFLKFYDEAEAALRNGLTIDEIIQNPVIEKLARARYTPENEFMAYGEGVMDELDQTFKAVKA

SEQ ID NO: 648 - protein, 293 aa, Cyanidioschyzon merolae
MSVQTSQQTVNLQTEFKQTQIQEVLDDLDRELIGLQTVKTRIREIAALLLVDRLRQKLGLSSSNPGLHMSFTGSPGTGKTTVARKMADILYRLGYIKKGHLITVTRDDLVGQYIGHTAPKTKQVLKNAMGGVLFIDEAYYLYRPDNERDYGAEAIEILLQVMENQRDDLVIIFAGYKDKMDRFYTSNPGLASRVANHVNFPDYTPEELLMIGKIMLQEQQYQMTPEAEKVFLQYIQRRMEQPHFANARSVRNALDRARLRQANRIFATPGKKLTKFDLVTIQAEDILKSRLFQ

SEQ ID NO: 649 - protein, 1145 aa, Clostridium perfringens str. 13
MLQKNIFVERKDMVNKEIIENGFFKIEKKLNEEFIGQKTFNKELCDYFKEKIEEDSKGILLIVEERDIFKNSVLKYFFEELNYYKFVKNSKIDEIDLAAYKFNLGYNAFLTDLYEKLNNDSQCLVFKNTDKASEDILNVLSGISPNSCIMLKDNYVIKNKFLVEAEEIDEDIVNKIICNNKFFIFLYNKDKGEELEIIDNEFLINKDKTLYRKALSEKDKNKVIKKKLLKEINKVKELFDIDIIIGVDENPDVEEKSGVCTYIEDNFREKGSLSLDQYISYKICKPIINIIRKEAIEANSRLLIYVEDDEIFCKSNDEVYDLSKYSNPTLEEVRYKLESIIGMKELKEFIDKIENNFKVQKIREKLGLKTTQISLNMIFAGNAGTGKTNAARITFEYLYALGMIKENIFKEVSKADFIGEGISNTARRTNEIIESALGGVLFIDEAYSLCTDENDKAGREIVDALLKGIEDNRDNITVILAGYEKDMETFLSFNQGLKSRFPNVIKFEDYNPSEMYEIAVNIAKSKGYRIAKSAKAGLIELFTKNQMVGKSDLGNARFVRNIVENAIMDASKKYLVNKERAIDLLEKDNFNFKVSAKFDLEEKLKEIIGLEEVKEFLRSQYKLIVAQEKRKSVGVNTKIEQNLNMIFAGNPGTGKTSIARLVAEMLNSMGLLKVGQLVETDRSSFVSDIPGETSKKTEEKFKEALGGVLFIDEAYTLANDSIGREAIETLLKLIEDYSREVIVILAGYEEEMENFFDVNIGLRSRFPLWTKFEDYNPNELLEMAIKLVEAKGFKLSKNGYSELKKNFVEIYENADAQSGNGRMVRNYVEQLIRNQSIRIAESDISVYEMNLINTKDIKAMNAIKYDNHFDLEKKLNNLIGNEELKDFLRGQYKLMKIREKRKKLGFQVDLNKYMNMVFTGESGTGKKTVLNIYSEMLYSMGIIKAKNIVQIDKYEFMAMINSGMKVEDILNKHVGKILYIDKWNTFFGEERYNEIVSDLIKFIDNNSNRIVIVLGGIRGKMKDLILTNEGLNYRFPIWVDFGNYNERELYDIASSTLVKKGFTLDEEAETALENAIGDIQKRMGELALKNGLMIKQFLDSLVRVQSIRVCDEDFDINTINRIISEDILKSTEIFLKKNTTQNGSF

SEQ ID NO: 650 - protein, 1026 aa, Pisum sativum
MSLPAETDMEDTKPSVVMVDNGDQAQFRFAEFSKNELALDEKSCKEAMDLFGETKHLLVANVLSMGNGTTEEAERNWFAFILYSIKKLAQKNEEIQKDEIENTGLTLCRILRAAKLNIAEFFKELPQFVVKAGPILSNLYGPDWENKLEAKEMHANTIHLKILSKYYKRVFEEFFVSTDANVENNSSVTNRVSEYHRFGWLLFLALRVHAFSRFKDLVTCTNGLISILAILIIHVPARFRSFNIHDSSRFVKKSANGVDLLASLCNLYNTSEDELRKTIEQANNLVADILKKKPCLASECETENLENFDRDGLTYFKDLMEESSLPSSLSVLENDYDHMTRNNGELDERLFINEDDSLLASGSLSRGSVSAGGVKRKIDLMTSPTKMITSPLSPHRSPASHANGIPSSATPMIAATPVSTAMTTAKWLRTVISPLPSKPSQELERFLTSCDKDITSDVIRRAQIILQAIFPSSPLGDRCVTGSLQSANLMDNIWAEQRRLEALKLYYRVLATMCRAEAQILGNNLTSLLTNERFHRCMLACSAELVLATHKTVTMLFPAVLERTGITAFDLSKVIESFIRYEESLPRELRRHLNSLEERLLESLVWEKGSSMYNSLAVARPALSVEINRLGLLAEPMRSLDEIAMDINFSCGGLPPVPSLPKPEPMSAQNGDPRSPKRPCTEHRNVLAERNSFTSPVKDRLLHLSNLKSKLLPPPLQSAFASPTKPNPGGGGETCAETGISVFFSKIVKLGAVRISGMVERLQLSQQIRENVYCLFQRILNQWTSLFFNRHIDQIILCCFYGVAKISQLNLTFREIIYNYRKQPQCKPEVFRSVFVDWSSARRNGSCKQRTGQEHIDIISFYNEVFIPSVKPLLVEIGPGGATTRNDRIPEANNKNDGHLAQCPGSPRISPFPSLPDMSPKKVSATHNVYVSPLRSSKMDALISHSSKSYYACVGESTHAYQSPSKDLTAINNRLNGNRKVRGPLNFDDVDVGLVSDSMVANSLYLQNGSSASSSGAPLKSEQPDS

SEQ ID NO: 651 - protein, 492 aa, Anthoceros formosae
MKTNYLILGVSTLISKNVGHISQIIGPVLDVTFPPGKMPNIYNSLIVRGQNPAGQEINVTCEVQQLLGNNKVRAVAMSATDGLTRGMKVTDTGAPLSVPVGEVTLGRIFNVLGEPVDNLGAIDVSTTFPIHRSAPAFTQLDTKLSIFETGIKVVDLLAPYRRGGKIGLFGGAGVGKTVLIMELINNIAKAHGGVSVFGGVGERTREGNDLYMEMKESKVINEQDISESKVALVYGQMNEPPGARMRVGLTALTMAEYFRDVNKQDVLLFIDNIFRFVQAGSEVSALLGRMPSAVGYQPTLSTEMGSLQERITSTKEGSITSIQAVYVPADDLTDPAPATTFAHLDATTVLSRGLAAKGIYPAVDPLDSTSTMLQPWIVGEEHYETAQGVKQTLQRYKELQDIIAILGLDELSEEDRLTVARARKIERFLSQPFFVAEVFTGSPGKYVSLIETIKGFQMILAGELDGLPEQAFYLVGNIDEVTAKAETLQMES

SEQ ID NO: 652 - protein, 478 aa, Streptomyces avermitilis MA-4680
MRRAKIVCTLGPATDSYDQIKALVEAGMDVARFNLSHGTYAEHEERYQHVRKASDETGRSVGVLGDLQGPKIRLGRFNEGPVLLERGDTFTITVEEGVEGDRQTCGTTYAGLAADVTPGERILVDDGKVCLEVTSVDGPRVHTTVVEGGMVSDHKGLNLPGVAVSVPALSDKDEADLRWALRQGFDVIALSFVRSGKDIKDVHRIMDEEGRRLPVIAKVEKPQAVENIDDIVAAFDGIMVARGDLGVEMPLEQVPIVQKRAIKLARRNAKPVIVATQMLDSMIDNSRPTRAEASDVANAVIDGTDAVMLSGETSVGKYPVETVRTMSRIVEAAEEDILATGLPPLTERNKPRTQGGAVARAAAEMGDFLGAKFLVAFTQSGDTVRRLSRYRSPIPLLAFTPMPATRSQLNLTWGVETFLGPHVDSTDAMVDQVDELLLKYGRCEKGDVVVITAGSPPGVSGSTNLVRVHHIGEDDSPK

SEQ ID NO: 653 - protein, 470 aa, Vibrio cholerae
MKKTKIVCTIGPKTESVEKLTELVNAGMNVMRLNFSHGDYVEHGTRITNFRKVMEVTGKQLAILLDTKGPEIRTIKLENGDDVDLVAGQEFTFTTDTKVVGNKERVAVTYSGFAKDLNVGNRILVDDGLIEMEVLATTDTEVKCKVLNNGALGENKGVNLPGVSVNLPALSEKDKNDLKFGCEQGVDFVAASFIRKGSDVKEIREVLASHGGQNIQIISKIENQEGLDNFDEILELSDGIMVARGDLGVEIPAEEVIFAQKMMIEKCNRARKVVITATQMLDSMIKNPRPTRAEAGDVANAIMDGTDAVMLSGETAKGKYPVEAVKIMAQIAERTDPVLKAELGSRLDSPRLRITEAVCKGAVDTAEKLAAPLIIVATEAGKSARSVRKYFPTANIIAVTTNKKTAAQLVLSKGVTPVVVDAIDNTDAFYHLGKEIALQSGLGKKGDIVVMVSGALVASGTTNTASVHVL

SEQ ID NO: 654 - protein, 475 aa, Zymomonas mobilis
MTEGLFPRGRKVRVVSTLGPASSTAEQIRDRFLAGADVFRINMSHGTHDEKKVIVDNIRALEKEFNRPTTILFDLQGPKLRVGDFKEGKVQLKEGQTFTFDQDPTLGDETRVNLPHPEIFKALDKGHRLLLDDGKIVVRCVESSPTKIVTRVEVPGPLSDHKGFNVPDVVIPLAALTPKDRKDLDFALKEKADWVALSFVQRVEDVIEAKELIKGRAPLLVKLEKPAAIENLESILAATDAVMVARGDLGVECLPESVPPTQKRIVERSRQLGKPVVVATAMLESMIKAPAPTRAEVSDVANAIYEGADGIMLSAESAAGDWPHEAVNMMHRIASYVENAPGYIERVRFTPTPAEPTTVDALAENASKTAETVGAKAIIVFTETGKTAQRVSRARPVAPILSLTPDAEVARRLGLVWGAQPVQVSTVKTLDEAKKLAAETAKKYGFAKAGDKLVVVAGEPFGKAGTTNIVDVIEA

SEQ ID NO: 655 - protein, 298 aa, Agrobacterium tumefaciens str. C58 (Cereon)
MATKMSTPSASSLEWMYKIMTVRMDKRFADLRAENRPALITYFMGGDPDFQTSLGIMKALPEAGADVIELGMPFSDPMADGPAIQLAGQRALKGGQTLKTTLDLAREFRKQDNATPIVMMGYYNPIYIYGVEKFLDDAIASGIDGLIVVDLPPEMDDELCIPALARGINFIRLATPTTDGKRLPAVLKNTSGFVYYVSMNGITGSALPDPSLISGAVGRIKAHTELPVCVGFGVKTADHAKAIGAVADGVVVGSAIVNQIAGSLTKDGQATADTVPAVTTLVKGLSTGVRASRLAAAE

SEQ ID NO: 656 - protein, 481 aa, Glycine max
  unsure (1)..(481): unsure at all Xaa locations
MEPYSIDGVSSQTNSKFYDDDGHVKRTGTVWTTSSHIITAVVGSGVLSLAWAMAQMGWVAGPAVMIFFSVVTLYTTSLLADCYRCGDPVTGKRYYTFMDAVQSILGGYYDCIXGVVQYSNLYGTAVGYTIAASISMMAIKRSNCFHSSGGKSPCQVSSNPYMIGFGIIQILFSQIPDFHETWWLSIVAAIMSFVYSTIGLALGIAKVAEMGTFKGSLTGVRIGTVTEATKVWGVFQGLGDIAFAYSYSQILIEIQDTIKSPPSEAKTMKKSAKISIGVTTTFYMLCGFMGYAAFGDSAPGNLLTGFGFFNPYWLIDIANAAIVIHLVGAYQVYAQPLFAFVEKWASKRWPEVETEYKIPIPCFSPYNLSPFRLVWRTVFVIITTFVAMLIPFFNDVLGLLGALGFWPLSVFLPVQMSIKQKRTPRWSGRWIGMQMLXVVWFIVMSAACCGSVASMRLELRGCRAVRGSWYGDRRCAWGGWE

SEQ ID NO: 657 - protein, 475 aa, Ochrosphaera neapolitana
MVDVASKTGIISQIIGPVVDVEFSSGDLPKVYNAIVIDAGDKKVTCEVQQLLGNNKVRAVSMTSTDGLKRGASVLDTGSPITVPVGVPTLGRIFNVLGEPVDELGPCNAESGLPIHRPAPSFTELETKPSVFETGIKVVDLLAPYKRGGKIGLFGGAGVGKTVLIMELINNIAKAHGGVSVFGGVGERTREGNDLYAEMKESKVIDEDKLENSKVALVYGQMNEPPGARMRVGLTALTMAEYFRDVNKQDVLLFIDHIFRFVQAGSEVSALLGSMPSAVGYQPTLATEMGVLQERITSTNEGSITSIQAVYVPADDLTDPAPATTFAHLDATTVLSRGLASKGIYPAVDPLDSTSTMLQPEIVGTEHYATAQRIKETLQRYKELQDIIAILGLDELSEDDRLTVSRARKVERFLSQPFFVAEVFTGSPGKYVSLNDSIDGFNRLLNGEFDDLPEQSFYLVGDINEAIAKAAKLKG

SEQ ID NO: 658 - protein, 262 aa, Aquifex aeolicus VF5
MGRISDKFTELKEKREKALVSYLMVGYPDYETSLKAFKEVLKNGTDILEIGFPFSDPVADGPTIQVAHEVALKNGIRFEDVLELSETLRKEFPDIPFLLMTYYNPIFRIGLEKFCRLSREKGIDGFIVPDLPPEEAEELKAVMKKYVLSFVPLGAPTSTRKRIKLICEAADEMTYFVSVTGTTGAREKLPYERIKKKVEEYRELCDKPVVVGFGVSKKEHAREIGSFADGVVVGSALVKLAGQKKIEDLGNLVKELKEGLRE

SEQ ID NO: 659 - protein, 343 aa, Lycopersicon esculentum
MACTKLHFPITATTLLVILILATLDFTGAQTGVCYGRNGNGLPSPADVVALCNRNNIRRMRIYDPHQPTLQALRGSNIELILGVQILTFRISASSQANANRWVKHVRNYGNVKFRYIAVGNEVSPLNGNAQYVPFVINAMRNIQNAISGAGLGNQIKVSTAIETELTTDTYPPSRGKFKDNVRGYVDPIIRFLVANRSPLLVNIYPYFAIANNQAIKLDYALFTSPGVVVNDNGREYRNLFDALLDATYSALEKAGGSSLDIVVSESGWPSAGAGQLTSIDNARTYNNNLIRHVKRGSPKRPSKPIEAYIFALFNENLKSPEIEKHFGLFTPNRQPKYPISFN

SEQ ID NO: 660 - protein, 418 aa, Ricinus communis
NAQSHDNVVSIMLDTKGPEVRSGDVPQPMLKEGQEFNPTIRRGVSTQDTVSVNYDDFVNDVVVGDILLVDGGMMSLAVKSKTSDLVKCVVVDGGELKSRRHLNVRGKSARLPSITDKDWGDIKFGVDNQVDFYAVSFVKDAKVVHELKEYLKRCNADIHVIVKIESADSIPNLHSIISASDGAMVARGDLGAELPIEEVPLLQEDIIRRCHSMQKPVIVATNMLESMINHPTPTRAEVSDIAIAVREGADAVMLSGETAHGKYPLKAVRVMHTVALRTESSSPVNTTPPAQGAYKGHMGEMFAFHATIMANTLNTPIIVFTRTGSMAVLLSHYQPASTIFAFTNEERIKQRLSLYRGVMPIYMEFSSDAEETFSRALQLLLNKGLLVEGEHVTLVQSGAQPIWRQESTHHIQVRKVQN

SEQ ID NO: 661 - protein, 623 aa, Lycopersicon esculentum
MPSLFGGPLTTFEDSEKESEYGYVRKVSGPVVVADGMAGAAMYELVRVGHDNLIGEIIRLEGDSATIQVYEETAGLMVNDPVLRTRKPLSVELGPGILGNIFDGIQRPLKTIAKRSGDVYIPRGVSVPALDKDILWEFEPKKIGEGDILTGGDLYANVFENSLMEHHVALPPDAMGKITYIAPAGHYSLKDTVLELEFQGVKKQFTMLQSWPVRTPRPVAAKLAADTPLLTGQRVLDALFPSVLGGTCAIPGAFGCGKTVISQALSKYSNSDTVVYVGCGERGNEMAEVLMDFPQLTMTLPDGREESVMKRTTLVANTSNMPVAAREASIYTGITIAEYFRDMGYNVSMMADSTSRWAEALREISGRLAEMPADSGYPAYLAARLASFYERAGKVKCLGGPERNGSVTIVGAVSPPGGDFSDPVTSATLGIVQVFWGLDKKLAQRKHFPSVNWLISYSKYSGALESFYEKFDPDFINIRTKAREVLQREDDLNEIVQLVGKDALAETDKITLETAKLLREDYLAQNAFTPYDKFCPFYKSVWMLRNIIHFYNLANQAVERGAGMDGQKMTYTLIKHRLGDLFYRLVSQKFEDPPEGEDALVAKFKKLHDDLTAGFRNLEDETR

SEQ ID NO: 662 - protein, 159 aa, Castanea sativa
DQIKVSTAVDTNLLDVFDPPSAGAFSDNARPFIEPIISFLVSNGAPLLANIYPYFRVRYNNQPVPYALFTATEVVVHDGQLEYRNLFDALMDALYSALEKRNGGSLKIVVSESGWPSAGGDVETIENAGTYYRNLINHVKGGAPKRPAKAIEAYLFAMF

SEQ ID NO: 663 - protein, 478 aa, Brucella suis 1330
MKRNRKVKILATLGPASGEEAVIRKLFEAGADVFRINMSHADHDLMRTLVKRIRNVEKELGRPIGILADLQGPKLRVGKFKDGKVDLVPGQTFTLDNNEALGDETRVFLPHPEILEAVEPGHRLLIDDGKLHLVAEACDGKSIRCKVVSGTRISDRKGVSLPDTTLGVGALTEKDRCDLDAVLKEEIDWVALSFIQRPEDLAEVRKVSRGKVGLMSKIEKPQAVTRLDEIIELSDALMVARGDLGVEVPLENVPGIQKQITRKARRAGKPVVVATQMLESMITAPVPTRAEVSDVATAVFEGADAIMLSAESASGQYPVEAVATMNRIAEQVEREPTYSTIIDAQRAMPEPTGADAISLAARQIAETLKLSAIVTYTASGTTGLRAARERPRTPIIALSPVVDTARKLSLVWGLHCVVTDDAHDLEDMVNHACEIVFHEEFGKAGDRVIITAGVPFGTPGATNMLRIAYIGADGKSGI

SEQ ID NO: 664 - protein, 456 aa, Helianthemum grandiflorum
  unsure (1)..(456): unsure at all Xaa locations
IGPVLDVTFPPRKMPNIYNALVVXGQDTLGQEINVTCEVQQLLGNNRVRAVAMSATDGLMRGMAVIDTGAPLSVPVGGVTLGRIFNVLGETVDSLGPVDTGTTAPIHKPAPAFIQLETKLSIFETGIKVVDLLAPYRRGGKIGLFGGAGVGKTVLIMELINNIAKSHGGVSVFAGVGERTREGNDLYMEMKESGVINEENLSKSKVALVYGQMNEPPGARMRVGLTALTMAEYFRDVNKQDVLLFIDNIFRFVQAGSEVSALLGRIPSAVGYQPTLSTEMGTLQERITSTKEGSITSIQAVYVPADDLTDPAPATTFAHLDATTVLSRPLASKGIYPAVDPLDSKSTMLQPRIVGDEHYETAQQVKQTLQRYKELQDIISVLGLDELSEEDRLTVARARKVERFLSQPFFVAEVFTGSPGKYVGLVETIKGFKLILSGKLDGLPEQAFYLVGNIDE

SEQ ID NO: 665 - protein, 265 aa, Ralstonia metallidurans
MSRIQKTFAALAAQQKKGLIPFITAGDPAPALTVDLMHALVAGGADVIELGVPFSDPMADGPVIQRASERALAQGVSLTQVLAWVTEFRKTNATTPVVLMGYANPIERMGEETFAKAASAAGVDGVLVVDYPPEECESFAALMRANQMDPIFLLAPTSTDDRIAAVAKVASGYLYYVSLTGVTGSATLDLESVAARLPLIKQHANLPVGVGFGIRDAQTARAIGSVADAVVIGSRLVQLLEDAPREKAVDSLRAFIADIRQALDA

SEQ ID NO: 666 - protein, 262 aa, Helicobacter pylori 26695
MRYQNMFETLKKHEKMAFIPFVTLGDPNYELSFEIIKTLIISGVSALELGLAFSDPVADGITIQASHLRALKHASMAKNFQLLKKIRDYNHNIPIGLLAYANLIFSYGVDGFYAQAKECGIDSVLIADMPLIEKELVIKSAQKHQIKQIFIASPNASSKDLEQVATHSQGYIYALARSGVTGASRILENDSSAIIKTLKAFSPTPALLGFGISKKEHITNAKGMGADGVICGSALVKIIEENLNNENAMLEKIKGFIGGMIF

SEQ ID NO: 667 - protein, 487 aa, Viscainoa geniculata
  unsure (1)..(487): unsure at all Xaa locations
RIXPXTSGXGVSALEKKXPGRIAQIIGPVLEVAFPPGNMPNIYNALIVKARNTFGXPINVTCEVQQLLGXNRVRAVAMSATDGLMRGMEVIDTGAPXSVPVGGATLGRIFNVLGEPVDNLGPVDTSTTSPIHRSAPAFIQLDTKLSIFETGIKVVDLLAPYRRGGKIGLFGGAGVGKTVLIMELINNIAKAHGGVSVFGGVGERTREGNDLYMEMKESGVINEKNIAESKVALVYGQXNEPPGARMRVGLTALTMAEYFRDVNEQDVLLFIDNIFRFVQAGSEVSALLGRMPSAVGYQPTLSTEMGSLQERITSTKEGSITSIQAVYVPADDLTDPAPATTFAHLDATTVLSRGLAAKGIYPAVDPLDSTSTMLQPRIVGEEHYETAQRVKQTLQRYKELQDIIAILGLDELSEEDRLTVARARKIERFLSQPFFVAEVFTGSPGKYVGLAETIRGFQLILSGELDSLPEQAFYLVGNIDEATAKAT

SEQ ID NO: 668 - protein, 315 aa, Bacillus halodurans
MSQTPSSSSVKGRINVILHNKPNKMEEETFFHSEEEREKHYVLEKMERELKKYVGLDEVKRLIKEVYAWIYINQCRTEQGLRASKQALHMIFKGNPGTGKTTVARLIARFFRDMNVLSKGQLIEAERADLVGEYIGHTAQKTRELIKKAQGGVLFVDEAYSLARGGEKDFGKEAIDTLVKAMEDQQHEFVLILAGYSDEMDYFLSLNPGLPSRFPIAMDFPNYTTDQLMQIVKNMVKEREYQLTKRAQHLIREHVTKVRQYEGRTFSNGRYIRNMIEEAIRRQAVRLLQEGSYSREALLLLKAEDFHFESSNVKP

SEQ ID NO: 669 - protein, 448 aa, Borrelia burgdorferi
MNKLEEHYIVPKDVVAELDKYIIGQDEAKKLVSIALVNRYIRSRLPKEIKDEVMPKNIIMIGSTGIGKTEIARRLSKLIKAPFIKVEATKYTEVGYVGRDVESMVRDLMGIRVNMVKEEMYSTVREDALIKTEERIVESLFKGSDNSENIDPNEIKAEEKVKEKLRKKLRAGELDDTTIEIQISSKMPFSTIEIFTGGNFEEIDMGIGGLLGNIFDRKKKRELKIKKAKEIILAEELEKLVDHENISDIAKSKVENMGIIFIDEIDKIAAKNRSGNDVSREGVQRDILPIIEGSKVNTKYGIVDTSHILFIAAGAFNLAKPSDLIPELQGRFPIKVELKSLSIDDLKKILKQTKNSLIKQYVAMFKVYDLDLKFSEEAIDRIAELTFNMNLESENLGARRLHGVMEIVLADLFFEVPGSKLKKFEINLDYVNKKIQINEQKDLNYYII

SEQ ID NO: 670 - protein, 267 aa, Coxiella burnetii RSA 493
MNRIEQQFKKSPAYVAYLTAGDGGLERSLESLLALAKGGVNILEVGVPFSDPVADGPVIQEASIRALAQGTTLHDVLTLITSFRQHSEIPIILFTYFNPLLAAGDKIYQQMKSAGVDGCLVVDLPVEEAAPHLTACKTAKIAPILLISPSTTQERLKKINEHGEGMLYYVCRPGTTGVRATLPENFPAKMNQIKSMTSLPIVTGFGIANRKMAAQALQYADGFVIGSLFVKAIAEGISKNALTRLAQSLNPHYPNLRLITPFRKKTF

SEQ ID NO: 671 - protein, 764 aa, Pisum sativum
MWKLKIGDGGKDRNIFSTNNFVGRQTWEFDPDAGTSQEKAQVEAARQHFYDNRFEVKACSDLLWRFQILKEKNFKQTIESVKIKDEEEISEENVAITLRRAVHHLSTLQSNDGHWPALNAGPLFYFPPLVFCMYVTGHLDSIFPYEYRKEILRYIYCHQNEDGGWGLHVEGHSIMFCTVLNYICMRILGEGPNGGKEDACARARKWIHDHGSVTHVSSWGKIWLSVLGIFDWCASNPMPPEFWMLPSFLLKHPAKMLCYCRLVYMPMSYLYGKRFVGPITPLILMLREELLTQPYEKVNWKKTRHLCAKEDLYYPHPLIQDLIWDSLYIFVEPLLTHWPFNKLLREKALQTVMKHIHYEDENSRYITIGCVEKVLCILACWVEDPNGDAFKKHLARLPDYLWVSEDGMTLHSFGSQTWDASLIIQALLATNLIEDVGPILTKAHEFIKKSQVRDNPSGDFKSMYRHISKGSWTFSDKDHGWQVSDCTAESLKCCLLLSMLPPEIVGEKMEPEMLYDSVNILLSLQGKKGGLPAWEPSEAVEWLELFNPIEFLEEIVVEREYVECTSSAIQALVLFKKLYPEHRKKEVENFIANAVRFLEYKQTSDGSWYGNWGICFTYGSWFALNGLVAAGKTYDNCAAIRKGVEFLLTTQREDGGWGESHLSSSKKIYVPLERSQSNIVQTSWAIMGLIHAGQMERDPTPLHRAVKLIINFQQEEGDWPQQELTGVFMKNCMLQYAMYRDIFPTWALAEYRRRILLASPAVAI

SEQ ID NO: 672 - protein, 163 aa, Schizosaccharomyces pombe
MTVNLEEKRPEIVGPEKVQSPYPIRFEGKVVHGFGRGSKELGIPTANISEDAIQELLRYRDSGVYFGYAMVQKRVFPMVMSVGWNPYYKNKLRSAEVHLIERQGEDFYEEIMRVIVLGYIRPELNYAGLDKLIEDIHTDIRVALNSMDRPSYSSYKKDPFFKV

SEQ ID NO: 673 - protein, 1012 aa, Chenopodium rubrum
MKMEDLFSLLPWLRDVPVQNQFSLDDKMYSDALKLFTESKSILSNNVSPIGSTTPEELERYMFAFILYASKRLGAKTTGDASEGSNQSGITLCQKLKAVKLNLVDFFKELPQFVVKIGPILSDMYGADWEKRLEAKELQANFVHLSLLSKYYKRAYQEFFKTNEVDKEVADPGTSSSDSISDYYRFGWLLFLALRVHAFSRFKDLVTCTNGIVSVLAILIIHIPARLRKFSALDLPLFEKKIDRGVNLVASLCQKYDTSEDEVKHMMEKANELILEILKKNPCSASLCKTENLENIDPDDLTYFEDLLEDSSLPNCISMLEKDYDAAIWNKGDIDERVFVNVDDSLLGSGSLSGGAINISGLREIRCNGLFNETIASPLSPCRSPALHVNGARGGVNIRMISTPVSTAMTTAKWLRTYISPLPSKPSPQLEKYLMSCDRNISSEVVRRAHIIMEAIFPNSALGERCIAGSLPNSNLTDNIWAQQRRLEALKLYYRVLETMCTAEAQLLHANNLTSLLTNERFHRCMLACSAELVLATHKTVTMLFPAVLEKTGITAFDLSKVIESFIRHEDSLPRELRRHLNSLEERLLESMAWEKGSSMDNSLIIARPALSAGINRFGLLAEPMPFLNAMAAHIEVSTGGLPPLPSSCKHEFAAGQNGDIRSPKRACTEYRSVLVERNSFTSPVKDRLINNLKQKLTPPALQSAFASPTRLSPGGGGETCAETGINIFFSKIVKLAAVRINGMIERLEKLEKQSQTQQLREQLRENVYCRFHIILNQRTSLFFNRHIDQIILCAFYGVAKISQYELTFKEIILNYRKQPQCKPQVFRSVFVDWSFSRRNRQGQDHVDIITFYNEVFIPSVKPLLGELGPQGACVKTDLIPESNNDKDGQCPGSPKLSTFPSLPDMSPKKVAKNVYVSPLRSSKMDALISNSSKSYYACVGESTHAFQSPSKDLTAINDRLNSTSKVRGALNFDTDAGLVSDSLVANSLYLQNGNCATTSSVGPLKTEQPDS

SEQ ID NO: 674 - protein, 496 aa, Heliconia irrasa
MRTNPTTSSPAVSTLERKNLGRIAQIIGPVLDVVFPPGKMPNIYNALVVKGRDTVGQQINVTCEVQQLLGNNRVRAVAMSATDGLTRGMGVIDTGAPLSVPVGGATLGRIFNVLGEPVDNLGPVDTSTTSPIHRPAPAFIQLDTKFSIFETGIKVVDLLAPYRRGGKIGLFGGAGVGKTVLIMELINNIAKAHGGVSVFGGVGERTREGNDLYMEMKESGVINEKNIAESKVALVYGQMNEPPGARMRVGLTALTMAEYFRDVNEQDVLLFIDNIFRFVQAGSEVSALLGRMPSAVGYQPTLSTEMGSLQERITSTKEGSITSIQAVYVPADDLTDPAPATTFAHLDATTVLSRGLAAKGIYPAVDPLDSTSTMLQPRIVGEEHYETAQRVKQTSQRYKELQDIIAILGLDELSEEDRLTVARARKIERFLSQPFFVAEVFTGSPGKYVGLAETIRGFQLILSGELDSLPEQAFYLVGNIDEATAKAMNLEGESKL

SEQ ID NO: 675 - protein, 253 aa, Lactococcus lactis subsp. lactis
MKTLQMTLSNKKNNFIPYIMAGDHEKGLEGLKETIQLLEQAGSSAIEIGVPFSDPVADGPVIEQAGLRALARNVSLSSILETLKTIDTKVPLVIMTYFNPVYQFGIEKFVAALEKTPVKGLIIPDLPKEHEDYIKPFINDKDICLVPLVSLTTPLSRQKELVADAEGFIYAVAINGVTGKENAYSNQLDQHLKALSSLTDVPVLTGFGISTLSDVDRFNKVSSGVIVGSKIVRDLHEGKENEVIKFIENAINF

SEQ ID NO: 676 - protein, 498 aa, Barleria prionitis
  unsure (1)..(498): unsure at all Xaa locations
XXINPTTSGSGVSTLEKKNLGRIVQIIGPVLDVAFPPGKMPNIYNALVVKGRDTVGQPINVTCEVQQLLGNNRVRAVAMSATDGLMRGMEVIDMGAPLSVPVGGATLGRIFNVLGEPVDNLGPVDTRTTFPIHRSAPAFIQLDTKLSIFETGIKVVDLLAPYRRGGKIGLFGGAGVGKTVLIMELINNIAKAHGGVSVFGGVGERTREGNDLYMEMKESGVINEENIAESKVALVYGQMNEPPGARMRVGLTALTMAEYFRDVNEQDVLLFIDNIFRFVQAGSEVSALLGRMPSAVGYQPTLSTEMGSLQERITSTKEGSITSIQAVYVPADDLTDPAPATTFAHLDATTVLSRGLAAKGIYPAVDPLDSTSTMLQPRIVGEEHYETAQRVKQTLQRYKELQDIIAILGLDELSEEDRLTVARARKIERFLSQPFFVAEVFTGSPGKYVGLAETIRGFQLILSGELDSLPEQAFYLVGNIDEATAKAMNLEMESNLKK

SEQ ID NO: 677 - protein, 549 aa, Bacillus sp.
MLLEDYLRGMKESSIEDIKKELEQIVGIKSVKDYILKIEDNLKVQQLRESKGFSRTNISMHMVFTGNPGTGKTTIARIVAKYLKVIGVLSTGQLREVTRADLVGEYVGQTARLTNDVIKSALGGVLFIDEAYTLSRNDHDTFGIEAIDTLVKGMEDYRDELVVILAGYSEEMKQFLNTNPGLRSRFPNIVHFEDYTPEEMWEISRIISKQKGYRITDSCQDAMLKLFEKSQIKGKNDSGNGRLVRNVIEAAILKQSSRLVHEINAPMDELAFEDFEFEDNSKFDLETKLSQVVGLENVKQLIRTQQNLLIAEKKRREAGLKVDATQSLHMIFSGNPGTGKTTVARIMASMFKEMGLLKSGNFVEVDSGGLTGEHVGQTAKKTEEIFRSALGGVLFIDEAYGLTSNSSYGQEAVNTLVKLMEDHREDIVVILAGYNKEMKEFLKSNSGLESRFPLNVSFPDYTENELFEIAKIIISSKGFFLTQESESVLQEQIAILHKQSSSHSGNGRMVRNYLEEITRNQSLRIAMNDVPVEEMNRFFHRILSRLKVF

SEQ ID NO: 678 - protein, 224 aa, Streptococcus pneumoniae
MPKTLTEKLNAIKAAGKGIFVPYIMAGDHEKGLDGLGETIHFLEDLGVSAIEVGIPFSDPVADGPVIEEAGLRSLAHGTSTQALVETLKTIETEIPLVIMTYFNSLFQYGVENFVKDLADTAVKGLIIPDLPHEHANFVEPFLADTDIALIPLVSLTTGIERQKELIEGAEGFVYAVAINGVTGKSGNYRADLDKHLAQLHQVADIPVLTGFGVSSQADLERFN

SEQ ID NO: 679 - protein, 252 aa, Aeropyrum pernix
MAIARPGFSVYLTIAWPSPDTFLEIASTLKGCVDYLELGIPTPKPLYDGPTIRLTHLKAVESGYSGPKTLSLAEEASQEAGVPYIVMAYATEQPWSFSEVLREASRKGALSVLPPDLPFELPGHVEWYVEESRRLGMEPSLFASPKFPHRWLDRYRRLDPLLIYLGLQPATGVKLPLAFLRNVKTARKIVGQVYMLAGFSIKSPEDALRVLEAGADAVVVGSEVARLVSSGRLGEARHLACSIRAAISERGG

SEQ ID NO: 680 - protein, 271 aa, Streptomyces coelicolor A3(2)
MSGNVQLLNDTLAAAKSEGRAALIAYLPAGFPTVTGGIEAVKAALDGGADVVEVGLPHSDPVLDGPVIQTADDIALRGGVRIADVMRTVREAHEATGKPILVMTYWNPIDRYGVERFTAELAEAGGAGCILPDLPVQESALWREHADKHGLATVFVVAPSSRDARLAEITAVGSGFVYAASLMGVTGTRASVGAQAEDLVRRTRATTDTPVCVGLGVSNAAQAAEVAGFADGVIVGSAFVKRMLDAPDDAAGLEGVRALAADLAKGVRGQA

SEQ ID NO: 681 - protein, 595 aa, Enterococcus faecalis V583
MSVQIGKIVKVSGPLILAENMSDASIQDICHVGDLGVIGEIIEMRGDVASIQVYEETTGIGPGEPVISTGEPLSVELAPGLIAEMFDGIQRPLDTFQEVTHSNFLGRGVKIDALDREKKWTFEPTVAVGEEVSAGDIVGVVQETPIIQHKIMVPFGVSGTIAEIKAGDFAIDETVYSVETAKGTESFSMMQKWPVRRGRPILEKLSPKVPMVTGQRVIDTFFPITKGGAAAVPGPFGAGKTVVQHQIAKWADVDLVVYVGCGERGNEMTDVLNEFPELIDPTTGESLMNRTILIANTSNMPVAAREASIYTGITIAEYFRDMGYSVAIMADSTSRWAEALREMSGRLEEMPGDEGYPAYLGSRLAEYYERAGQVIALGKDHREGSITAISAVSPSGGDISEPVTQNTLRVVKVFWGLDSQLAQKRHFPSINWLQSYSLYSTEVGQYLDLELQGNWAAMVAEGMRILQEESQLEEIVRLVGIDSLSDKDRLTLETAKSLREDYLQQNAFDDVDTFTSRTKQAKMLQLILTFGEEGQKALSLGTYFSELMAGTVEIRDRIARSKYLPEEELEKLDRLQAEIKTTIKEIIAEGGMTND

SEQ ID NO: 682 - protein, 360 aa, Triticum aestivum
MCTVSSAWRLRPFHHAPVLFPFPSLAPPLPEPSRLPLRMADAKAEAARQAPQSSQEEEEDWKEAEGDVEVADRSTSNGGGAGEGITDRPIRVYADGIYDLFHFGHARSLEQAKKSFPNAYLLVGCCNDELTHQYKGRTVMTEDERYESLRHCKWVDEVIPDAPWVVTEEFLNKHNIDFVAHDSLPYHDASGASNDVYEFVKKLGKFKETKRTEGISTSDIIMRIVKDYNEYVMRNLARGYSRNDLGVSYVKEKRLRVNMGLKTLRDKVKQHQEKVGEKWSTVAKLQEEWVENADRWVVGFLEKFEEGCHSMGTAIKERIQERLKEAQSRDFSLLQYDSDDFDDFEEEDDEVAKDAKYVKE

SEQ ID NO: 683 - protein, 239 aa, Thermotoga maritima
MKGFIAYIPAGFPDLETTRKILIALNELGITGVEIGVPFSDPVADGPVIQLAHSVALRNGVTIKKILEMLSEISVDYDLYLMSYLNPIVNYPEGKEKLLDELKKLGVKGLIIPDLPLREVKNVDIAYPIVPFVAPNTKDEEIDLINSVQAPFVYYISRYGVTGEREDLPFADHIKRVKERIKLPLFVGFGISRHEQVKKVWEIADGVIVGSALVRIMEENPKDEIPRKVVEKVKELLGK

SEQ ID NO: 684 - protein, 265 aa, Ralstonia solanacearum
MSRIAQTFSQLSAQGRKGLIPFITAGDPYPELTVDLMHALVKGGANVIELGVPFSDPMADGPVIQRASERALAKKIGLRTVLDYVRAFRATDKTTPVVLMGYANPIERMGIDAFAKAASEAGVDGVLVVDYPPEECEAFAKTMRAAGIDPIFLLAPTSTEARMAQIARVASGYIYYVSLKGVTGAATLDLDSVAARIPQIRQHARLPVGVGFGIRDAATARAIGGVADAVVIGSRIVQLLEEASREQAVQCLTDFIADIRQALDA

SEQ ID NO: 685 - protein, 492 aa, Vibrio parahaemolyticus RIMD 2210633
MCKTKIVATLGPASESRETLTKLIRAGANVVRLNFSHGTAQEHIARANLVREIAAELDTYVGVLVDLQGPKIRISCFENGAVLLNQGDVFTLSGTLDAQSGTQEMVGLDYPELIQDVNEGDILLLDDGRIQLKVSQLHRDEQWIKTTVLNSGKLSNRKGINLLGGGLSAPALTAKDIQDIDTAAKLRADFLAISFPRNAQDIEYARSLAQKAGCHAKIVAKVERAEVVETKEAMDDVIKASDIIMVARGDLGVEIGDARLPMVQKSLINRSKHWGKPVITATQMLESMIENPLPTRAEVLDVANAIIDGTDAVMLSAESAAGKYPIEAVEAMVRIAQGAEHELECNHDCWDTLQHLCSNPGKSFALSSMISASRVHQDLGVAILTQHGETPLLMSRCQSKTKIWALSDNPALLAQMTILRGVEPLYFKAAESHVDLAPQLVECLRQKANEAHISSILMTQLDSIEGMGEINACRLLSLNVSSHMKPAEEIAA

SEQ ID NO: 686 - protein, 207 aa, Triticum aestivum
  unsure (1)..(207): unsure at all Xaa locations
ERRQDSSIGFGAPIRTNMRSSGVTSPTITSSLLESVESGDLAXFGLIPEFIGRLPILVSLAALDEDQLVQVLTEPKNSLSRQYRKMFSLNNVKLHFTDGALRIVAKKAIVKNTGARGLRALLETILLEAMYEIPDEKAGNERVDAVVVDEEAIGSVDRPGCGAKILRGDGALAQYIIRNNIPNSPETNEALAGELEDAYMLSRIVSL

SEQ ID NO: 687 - protein, 486 aa, Wigandia caracasana
  unsure (1)..(486): unsure at all Xaa locations
GSGVSTLEKKNXGRIVQIIGPVLDVAFLPGKMPNIYNALVVKGRDTVGQPINVTCEVQQLLGNNRVRAVAMSATDGLTRGMEVIDTGAPLSVPVGGATLGRIFNVLGEPVDNLGPVDTRTTSPIHRPAPAFIQLDTKLSIFETGIKVVDLLAPYRRGGKIGLFGGAGVGKTVLIMELINNIAKAHGGVSVFGGVGERTREGNDLYMEMKESGVINEENIAESKVALVYGQMNEPPGARMRVGLTALTMAEYFRDVNEQDVLLFIDNIFRFVQAGSEVSALLGRMPSAVGYQPTLSTEMGSLQERITSTKTGSITSIQAVYVPADDLTDPAPATTFAHLDATTVLSRGLAAKGIYPAVDPLDSTSTMLQPRIVGEEHYETAQRVKQTLQRYKELQDIIAILGLDELSEEDRLTVARARKIERFLSQPFFVAEVFTGSPGKYVGLAETIRGFQLILSGELDGLPEQAFYLVGNIDEATAKAMNLEMES

SEQ ID NO: 688 - protein, 151 aa, Pisum sativum
REESVMKRTTLVANTSNMPVAAREASIYTGITLAEYFRDMGYNVSMMADSTSRWAEALREISGRLAEMPADSGYPAYLAARLASFYERAGKVKCLGGPERTGSVTIVGAVSPPGGDFSDPVTSATLSIVQVFWGLDKKLAQRKHFPSVNWL

SEQ ID NO: 689 - protein, 409 aa, Streptococcus pyogenes M1 GAS
MAGSRTNDIKVYCSFCGKSQDDVKKIIAGNNVFICNECVALSQEIIKEELAEEVLADLTEVPKPKELLDVLNQYVVGQDRAKRALSVAVYNHYKRVSFTESRDDDDVDLQKSNILMIGPTGSGKTFLAQTLAKSLNVPFAIADATSLTEAGYVGEDVENILLKLIQAADYNVERAERGIIYVDEIDKIAKKGENVSITRDVSGEGVQQALLKIIEGTVASVPPQGGRKHPNQEMIQIDTKNILFIVGGAFDGIEEIVKQRLGEKVIGFGQNSRKIDDNASYMQEIISEDIQKFGLIPEFIGRLPVVAALEQLNTSDLIQILTEPRNALVKQYQALLSYDGVELAFDKEALEAIANKAIERKTGARGLRSIIEETMLDIMFEIPSQEDVTKVRITKAAVEGKSKPVLETA

SEQ ID NO: 690 - protein, 456 aa, Carica papaya
  unsure (1)..(456): unsure at all Xaa locations
IGPVXDVAFPPGKMPNIYNALVVKGRDTVRQPINVTCEVQQLLGNNRVRAVAMSATDGLTRGMEVIDTGAPLSVPVGGATLGRIFNVLGEPVDNLGPVDTRTTSPIHKSAPAFIQLDTKFSIFETGIKVVDLLAPYRRGGKIGLFGGAGVGKTVLIMELINNIAKAHGGVSVFGGVGERTREGNDLYMEMKESGVINEQNLAESKVALVYGQMNEPPGARMRVGLTALTMAEYFRDVNEQDVLLFIDNIFRFVQAGSEVSALLGRMPSAVGYQPTLSTEMGSLQERITSTKEGSITSIQAVYVPADDLTDPAPATTFAHLDATTVLSRGLAAKGIYPAVDPLDSTSTMLQPRIVGEEHYETAQRVKQTLQRYKELQDIIAILGLDELSEEDRLTVARARKIERFLSQPFFVAEVFTGSPGKYVGLAETIRGFKLILSGELDGLPEQAFYLVGNIDE

SEQ ID NO: 691 - protein, 488 aa, Rhamnus cathartica
  unsure (1)..(488): unsure at all Xaa locations
SXXGVSXLEKNNLGRIAQIIGPVLDVAFPPGKMPNIYNALVVKSRDTVGQQINVTCEVQQLLGNNRVRAVAMSATDGLMRGMEVVDTGAPLSVPVGGTTLGRIFNVLGEPIDNLGPVDTRTTSPIHRSAPAFIQLDTKLSIFETGIKVVDLLAPYRRGGKIGLFGGAGVGKTVLIMELINNIAKAHGGVSVFGGVGERTREGNDLYMEMKESGVINEENIEESKVALVYGQMNEPPGARMRVGLTALTMAEYFRDVNEQDVLLFIDNIFRXVQAGSEVSALLGRMPSAVGYQPTLSTEMGTLQERITSTKEGSITSIQAVYVPADDLTDPAPATTFAHLDATTVLSRGLAAKGIYPAVDPLDSTSTMLQPRIVGEEHYETAQRVKQTLQRYKELQDIIAILGLDELSEEDRLTVARARKIERFLSQPFFVAEVFTGSPGKYVGLAETIRGFKLILSGELDSLPEQAFYLVGNIDEATAKATNLEMESK

SEQ ID NO: 692 - protein, 425 aa, Rickettsia conorii
MVVEADKKALICSFCSKKQHEVKKLIAGPAVFICDECIDLCTDIMKEENKVALKQITSSIPTPQKICGILNDYVVGQDQAKKILAVAVYNHYKRLEYVQSGNNDVELNKSNILLIGPTGSGKTLLAQTLAKILDVPFTMADATSLTEAGYVGEDVENILLRLLIASEFNIAKAQKGIIYIDEVDKIARKSENPSITRDVSGEGVQQALLKIMEGTVASVPPQGGRKHPQQDFVQLDTSNILFICGGAFMGIDSIITSRTNHSSIGFAANVNIDKEKNNSEILKSLEIEDLTKFGLIPEFIGRLPIVTTLDELDKEALITILTKPKNAIVKQYQKQFELDDAELVIDYSALETIAEKALAKKTGARGLRSILEHLLLDSMYKVAELKKQRVTITKEVVNGLVEPIMTSLISTKSNKKQPIITDIPA

SEQ ID NO: 693 - protein, 487 aa, Thymelaea hirsuta
  unsure (1)..(487): unsure at all Xaa locations
GVXTLEKXXLGRXXQIIGPVLDVXXPPGKMPNIYNALVVKGRXTXGXXINVXXXVXQLLGNNRXXAIAXXXTDGLXRGMEVIDTGAPLXVPVGXATLGRIFNVLGEPVDNLGPVDTRTTSPIHXSAPAFIQLDTXLSIFETGXKVVDLLAPYRRGGKIGLFGGAGVGKTVLIMELINXIAKAHGGVSVFGGVGERTREGNDLYMEMKESGVINEKDLAESKVALVYGQMNEPPGARMRVGLTALTMAEYFRDVNEQDVLLFIDNIFRFVQAGSEVSALLGRMPSAVGYQPTLSTEMGSLXERITSTKEGSITSIQAVYVPADDLTDPAPATTFAHLDATTVLSRGLAAKGIYPAVDPLDSTSTMLQPRIVGEEHYETAQRVKQTLQRYKELQDIIAILGLDELSEEDRLTVARARKIERFLSQPFFVAEVFTGSPGKYVGLAETIRGFKLILSGELDGLPEQAFYLVGNIDEATAKATNLXMESKLK

SEQ ID NO: 694 - protein, 202 aa, Lycopersicon esculentum
GKNGNDLPSTIDVVSLYLANNITKMKTYDPINETLPALKGSEIEVILDIPNSQLQSLGDPQQADSWVTSNVVNYVQQVKIKYINVGNEVSPVNNGTSQFVPFLLPALTNVQQSITKSGLQDQVKVTTAIETGLLATTYPPSESAFREDTIGFIKPIIELLKQNNAPLQANIYPYFGYIGDPAHVTLPYALFTQEQPDPSGYT

SEQ ID NO: 695 - protein, 476 aa, Neurada procumbens
  unsure (1)..(476): unsure at all Xaa locations
XGYQSLGRISQIIGPVLDVAFPPGKMPNIYNALVVKGRDTTGQQINVTCEVQQLLGNNRVRAVAMSATDGLTRGMEVIDTGAPLSVPVGGATLGRIFNVLGEPVDNLGPVDTRTTSPIHKSAPAFIQLDTKLSIFETGIKVVDLLAPYRRGGKIGLFGGAGVGKTVLIMELINNIAKAHGGVSVFGGVGERTREGNDLYMEMKESGVINEQNIAESKVALVYGQMNEPPGARMRVGLTALTMAEYFRDVNEQDVLLFIDNIFRFVQAGSEVSALLGRMPSAVGYQPTLSTEMGTLQERITSTKEGSITSIQAVYVPADDLTDPAPATTFAHLDATTVLSRGLAAKGIYPAVDPLDSTSTMLQPRIVGEDHYETAQRVKQTLQRYKELQDIIAILGLDELSEEDRLTVARARKIERFLSQPFFVAEVFTGSPGKYVGLAETIRGFKLILSGELDGLPEQAFYLVGNIDEATAKATNL

SEQ ID NO: 696 - protein, 421 aa, Hordeum vulgare subsp. vulgare
MDSASNNARTVAACVIGGIVLGASVVALHLGAGPAAPSLPPVEALRRRFRRRCRPVRVYMDGCFDMMHYGHCNALRQARALGDELVVGVVSDDEITANKGPPVTPLHERMKMVRAVKWVDDVIPDAPYAITEDFMNKLFNEYNIDYIIHGDDPCLLPDGTDAYALAKKAGRYKQIKRTEGVSTTDIVGRMLLCVRERPVSDNNSHSSLQRQFSHGHGQNIDDSGFGSGTKISHFLPTSRRIVQFSNGRGPGPNSRVVYIDGAFDLFHAGHVEILRLARGLGDFLLVGIHTDQTISSTRGPHRPIMNLHERSLSVLACRYVDEVIIGAPWHISKDMVTTFNISLVVHGTIAENMDYTEDDSNPYAVPVAMGIYHKLESPLDITTSTIIRRIVSNHEAYQKRNEKKEASEKKYYDSKSFVNGE

SEQ ID NO: 697 - protein, 331 aa, Pseudomonas fluorescens PfO-1
MLPPGRDHPGTGKRPRPGRSIQTRTETAEGSPDGGQPVRSRRQRHADRHAPHGNFQAGETLMSRLQTRFAELKEQNRAALVTFVTAGDPDYDTSLAILKGLPKAGADVIELGMPFTDPMADGPAIQLANIRALGAKQNLTKTLQMVREFREGNSDTPLVLMGYFNPIHKFGVERFIAEAKEAGVDGLIVVDMPPEHNSELCDPAQAAGIDFIRLTTPTTDDARLPKVLNGSSGFVYYVSVAGVTGAGAATLEHVEEAVARLRRHTDLPISIGFGIRTPEQAASIARLADGVVVGSALIDHIANATTPDQAIDGVLSLCSALSEGVRKARVS

SEQ ID NO: 698 - protein, 425 aa, Glycine max
MYVVPPPQRSDPGSGSGDLRVYQAWKGSNKFFLQGRFIFGPDARSLALTIFLIAAPVAVFCVYVARKLIDDFSDHLGVTIMAIAVIFTIYVLVLLLLTSGRDPGIIPRNAHPPEPEGFEGSLDVGAGQTPQLRLPRIKEVEVNGITVKVKYCDTCMLYRPPRCSHCSICNNCVERFDHHCPWVGQCIGLRNYRFFFMFVFSTTLLCIYVFAFCWVYIRRIMTVIMASEETTIWKEMIKTPASIVLIIYTLISMWLHMRTTDSHLYYGTSQSNTGVFNNFLEIFCTSIPQSKNNFRAKVPMEPVLPARSVGGGFMSPSMGKAVDDIEMGRKTVWADMGTALDPSEGQLNDRVAVKDGEFGELSPEIRTTVDETSHRAGMHPRRSSWGRKSGSWEMSPEVLALAAKVGESNRMGGGSSSLTTENRHT

SEQ ID NO: 699 - protein, 477 aa, Swietenia macrophylla
  unsure (1)..(477): unsure at all Xaa locations
LEKKKMGQIAQIIGPVLDVPFPPGKMPNIYNALVVKGXBTVGQPINVTCEVQQLLGNNRVXAVAMIATDGLTRGMEVIDTGAPLSVPVGGATLGRIFNVLGEPVDNLGPVDTLTTSPIHKPAPAFIQLDTKLSIFETGIKVVDLLAPYRRGGKIGLFGGAGVGKTVLIMELINNIAKAHGGVSVFGGVGERTREGNDLYMEMKESGVINEQNIAESKVALVYGQMNEPPGARMRVGLTALTMAEYFRDVNEQDVLLFIDNIFRFVQAGSEVSALLGRMPSAVGYQPTLSTEMGSLQERITSTKEGSITSIQAVYVPADDLTDPAPATTFAHLDATTVLSRGLAAKGIYPAVDPLDSTSTMLQPRIVGEEHYETAQRVKQTLQRYKELQDIIAILGLDELSEEDRLTVARARKIERFLSQPFFVAEVFTGSPGKYVGLAETIRGFKLILSGELDGLPEQAFYLVGNIDEVTAKATNLE

SEQ ID NO: 700 - protein, 489 aa, Koelreuteria paniculata
  unsure (1)..(489): unsure at all Xaa locations
DPGVSXXEKQNLGRIAQIIGPVLDVDFLPGEMPNIYNALVVRGRNTVGQPINVTCEVQQLLGNNRVRAVAMSATDGLMRGMEVIDTGTPLSVPVGGATLGRIFNVLGEPVDNLGPVDTRTTSPIHKSAPAFIQLDTKLSIFETGIKVVDLLAPYRRGGKIGLFGGAGVGKTVLIMELINNIAKAHGGVSVFGGVGERTREGNDLYMEMKESGVINEQNLAESKVALVYGQMNEPPGARMRVGLTALTMAEYFRDVNEQDVLLFIDNIFRFVQAGSEVSALLGRMPSAVGYQPTLSTEMGSLQERITSTKAGSITSIQAVYVPADDLTDPAPATTFAHLDATTVLSRGLAAKGIYPAVDPLDSTSTMLQPRIVGEEHYETAQRVKQTLQRYKELQDIIAILGLDELSEEDRLTVARARKIERFLSQPFFVAEVFTGSPGKYVGLAETIRGFKLILSGELDGLPEQAFYLVGNIDEVTAKATNLEMESNLK

SEQ ID NO: 701 - protein, 487 aa, Strasburgeria robusta
TLEKKNLGRIAQIIGPVLDVAFPPGKMPNIYNALVVKGRDTVGQQINVTCEVQQLLGNNRVRAVAMSATDGLMRGMEVIDTGAPLSVPVGGATLGRIFNVLGEPVDNLGPVDTGTTSPIHRSAPAFIQLDTKLSIFETGIKVVDLLAPYRRGGKIGLFGGAGVGKTVLIMELINNIAKAHGGVSVFGGVGERTREGNDLYMEMKESGVINEQNIAESKVALVYGQMNEPPGARMRVGLTALTMAEYFRDVNEQDVLLFIDNIFRFVQAGSEVSALLGRMPSAVGYQPTLSTEMGSLQERITSTKEGSITSIQAVYVPADDLTDPAPATTFAHLDATTVLSRGLAAKGIYPAVDPLDSTSTMLQPRIVGEEHYETAQRVKQTLQRYKELQDIIAILGLDELSEEDRLTVARARKIERFLSQPFFVAEVFTGSPGKYVGLAETIRGFKLILSGELDGLPEQAFYLVGNIDEATAKATNLEMESNLKKMD

SEQ ID NO: 702 - protein, 243 aa, Glycine max
MAFPDPSMSASPQRKMGRGKIEIKRIENTTNRQVTFCKRRNGLLKKAYELSVLCDAEVALIVFSSRGRLYEYANNSVKATIERYKKASSDSSGAGSASEANAQFYQQEADKLRQQISNLQNNNRQMMGDSLGSLTAKDLKNLETKLEKGISRIRSKKNELLFAEIEYMQKREIDLHNNNQLLRAKIAESERNHHNMAVLPGGSNYDSMQSSQQQFDSRGYFQVTGLQPNNQYARQDQMSLQLV

SEQ ID NO: 703 - protein, 217 aa, Lactobacillus plantarum WCFS1
MTKAVIFDLDGLLIDSEVISLKMYQRIVQDYGQTLSMATYAQEYSGKSAVTNMQHLIERFDLPFDVDTGLKRALALEKTFMQDGVELKPGARVLLQFLHRNHYSVALASSSIKSRALDILTSHDVAQYFDQFTFGPDVDRGKPYPDIFLMACAKLQQQPADCLVLEDSEAGIQAATSAKIPVICVPDMKRPNQPYADQATAIVPSLTDVITYLKSVR

SEQ ID NO: 704 - protein, 488 aa, Abroma augustum
  unsure (1)..(488): unsure at all Xaa locations
XGVSTLXKRNLGRISQIIGPVLDVAFPPGKMPNIYNALVVKGRDTIGQQINVTCEVQQLLGNNRVRAVAMSATDGLMRGMEVIDTGAPLSVPVGGATLGRIFNVLGEPVDNLGPVDTRTTSPIHKPAPAFIQLDTKLSIFETGIKVVDLLAPYRRGGKIGLFGGAGVGKTVLIMELINNIAKAHGGVSVFGGVGERTREGNDLYMEMKESGVINEQNLAESKVALVYGQMNEPPGARMRVGLTALTMAEYFRDVNEQDVLLFIDNIFRFVQAGSEVSALLGRMPSAVGYQPTLSTEMGSLQERITSTKEGSITSIQAVYVPADDLTDPAPATTFAHLDATTVLSRGLAAKGIYPAVDPLDSTSTMLQPRIVGEEHYETAQRVKQTLQRYKELQDIIAILGLDELSEEDRLTVARARKIERFLSQPFFVAEVFTGSPGKYVGLAETIRGFKLILSGELDGLPEQAFYLVGNIDEATAKATNLEMESKLK

SEQ ID NO: 705 - protein, 280 aa, Corynebacterium glutamicum ATCC 13032
MSRYDDLFARLDTAGEGAFVPFIMLSDPSPEEAFQIISTAIEAGADALELGVPFSDPVADGPTVAESHLRALDGGATVDSALEQIKRVRAAYPEVPIGMLIYGNVPFTRGLDRFYQEFAEAGADSILLPDVPVREGAPFSAAAAAAGIDPIYIAPANASEKTLEGVSAASKGYIYAISRDGVTGTERESSTDGLSAVVDNIKKFDGAPILLGFGISSPQHVADAIAAGASGAITGSAITKIIASHCEGEHPNPSTIRDMDGLKKDLTEFISAMKAATKKV

SEQ ID NO: 706 - protein, 478 aa, Androsace spinulifera
LEKKKPGRIIQIIGPVLDVSFPPGKMPNIYNALVVKGRDTGGQPINVTCEVQQLLGNNRVRAVAMSATDGLTRGMEVIDTGTALRVPVGGATLGRIFNVLGEPVDNLGPVDTRTTSPIHRSAPAFIQLDTKLSIFETGIKVVDLLAPYRRGGKIGLFGGAGVGKTVLIMELINNIAKAHGGVSVFGGVGERTREGNDLYMEMKESGVINEENIAESKVALVYGQMNEPPGARMRVGLTALTMAEYFRDVNEQDVLLFIDNIFRFVQAGSEVSALLGRMPSAVGYQPTLSTEMGSLQERITSTKEGSITSIQAVYVPADDLTDPAPATTFAHLDATTVLSRGLAAKGIYPAVDPLDSTSTMLQPRIVGEEHYETAQRVKETLQRYKELQDIIAILGLDELSEEDRLTVARARKIERFLSQPFFVAEVFTGSPGKYVGLAETIRGFQLILSGELDGLPEQAFYLVGNIDEATAKAMKLEM

SEQ ID NO: 707 - protein, 487 aa, Maesa tenera
  unsure (1)..(487): unsure at all Xaa locations
MRINPTPSGPGXSVLEKKNLGHIIQIIGPVLDVTFPPGKMPNIYNALVVKGRDTAGQPINVTCEVQQLLGNNRVRAVAMSATDGLTRGMEVIDTGAALSVPVGGATLGRIFNVLGEPVDNLGPVDTRTTSPIHRSAPAFIQLDTKLSIFETGIKVVDLLAPYRRGGKIGLFGGAGVGKTVLIMELINNIAKAHGGVSVFGGVGERTREGNDLHMEMKESGVINEENIAESKVALVYGQMNEPPGARMRVGLTALTMAEYFRDVNEQDVLLFIDNIFRFVQAGSEVSALLGRMPSAVGYQPTLSTEMGSLQERITSTKEGSITSIQAVYVPADDLTDPAPATTFAHLDATTVLSRGLAAKGIYPAVDPLDSTSTMLQPRIVGEEHYETAQKVKQTLQRYKELQDIIAILGLDELSEEDRLTVARARKIERFLSQPFFVAEVFTGSPGKYVGLAETIRGFQLILSGELDGLPEQAFYLVGNIDEATAKA

SEQ ID NO: 708 - protein, 417 aa, Geobacter metallireducens
MSRRNDSSENLTCSFCGKSQDEVKKLIAGPTVYICDECIELCNDIIAEESKLEEAMGPDVKKLPKPREIKDVLDEYVIGQDRAKKILAVAVYNHYKRIESMGKPSDVEMQKSNILLLGPTGSGKTLLAQTLARILRVPFAMADATNLTEAGYVGEDVENIILNLLQAADYDVERAQKGIIYIDEIDKIARKSDSPSITRDVSGEGVQQALLKIIEGTVASVPPKGGRKHPQQEFLKVDTSNILFICGGAFAGLDNIIQQRIGVKTLGFGADVKSKVEKKAGELLTDVTPEDLLKFGFIPEFIGRLPVLATLHELDEAAMVQILKEPKSALVKQYQKLFEMEHVKLKFTDGSLVAIAREALKRKTGARGLRSILENAMLDIMYEIPSQTMVKEVVISEDVIYNREKPIIVYESVAESA

SEQ ID NO: 709 - protein, 274 aa, Zymomonas mobilis subsp. pomaceae
MSRIANTFAKTKKENRAALIAFLTAGDPSIEATPALLDSLVENGVDIIELGMPFSDPMADGPAIQKANLRALAAKTGYNDIFRIATEFRKRHPETPLILMGYANPMTFKGSDSFAASAKDAGVDGIICVDIPPEEDATLGVAVREKGMDMIRLATPTSDEARLKIILDGASGFLYYVSVAGVTGLQQATEASIDAALDRIKSVTDLPVAVGFGIRSPEQAAAIAKKADAVVVGSAFVSCIEKAVTNRQDPNAALEKLAKELSTAISDARKEAAL

SEQ ID NO: 710 - protein, 267 aa, Prochlorococcus marinus subsp. marinus str. CCMP1375
MESSILERCFSQSKKEGRIALMPFIMAGDPDVNTSAEILIMLEKKGADIIELGIPYSDPLADGPIIQKAASRALNSGTSPKSVLEMLSTLKTKLSVPIILFTYSNPLLNYGMEEFCIDASKAGAAGLVVPDLPLEETEKLSSIALSKNLDLVLLVAPTTPKERMRKISQRSNGFTYLVSVTGVTGERSALENRVQLLINELRGFSSTPVAVGFGISDTKHVIQVKRWGADGAIIGSALVKRISNATTGQEAEEAGKFCSELYKATSL

SEQ ID NO: 711 - protein, 458 aa, Ephedra equisetina
  unsure (1)..(458): unsure at all Xaa locations
QIIGPVLDVSFPLGNLPNIYNSLIVKGQIGSKEINITCEVQQLLGNNTVRTVAMSATDGLMRGMKVIDTGAPLSVPVGKMTLGRIFNVLGEPVDNLGPIDTSTTFXIHRPAPAFSQLDINLAIFETGIKVVDLLAPYRRGGKIGLFGGAGVGKTVLIMELINNIAKAHGGVSVFGGVGERTREGNDLYMEMKESGVINEKNIIESKVALVYGQMNEPPGARMRVGLPALTMAEYFRDVNEQDVLLFIDNIFRFVQAGSEVSALLGRMPSAVGYQPTLSTEMGSLQERITSTKKGSITSIQAVYVPADDLTDPAPATTFAHLDATTVLSRGLAAKGIYPAVDPLDSTSAMLQPRIVGEKHYEIAQEVKQTLQRYKELQDIIAILGLDELSEEDRLTVARARKIERFLSQPFFVAEVFTGSPGKYVSLIETTRGFQMILAGDLDGLPEQSFYLIGNIDEV

SEQ ID NO: 712 - protein, 489 aa, Potamogeton berchtoldii
INPTTSDPTISPLGEKNLGRIAQIIGPVLDVAFPPGNMPNIYNALVVKGLDTVGEQINVTCEVQQLLGNNRVRAVAMSATDGLRRGMAVIDTGAPLSVPVGGATLGRIFNVLGEPVDNLGPVDTRTTSPIHRSAPAFIQLDTKLSIFETGIKVVDLLAPYRRGGKIGLFGGAGVGKTVLIMELINNIAKAHGGVSVFGGVGERTREGNDLYMEMKESGVINEQNIAESKVALVYGQMNEPPGARMRVGLTALTMAEYFRDINEQDVLLFIDNIFRFVQAGSEVSALLGRMPSAVGYQPTLSTEMGSLQERITSTKEGSITSIQAVYVPADDLTDPAPATTFAHLDATTVLSRGLAAKGIYPAVDPLDSTSTMLQPWIVGEEHYEIAQKVKETLQRYKELQDIIAILGLDELSEEDRLTVARARKIERFLSQPFFVAEVFTGSPGKYVGLAETIRGFQLILSGELDSLPEQAFYLVGNIEEATAKAMTLE

SEQ ID NO: 713 - protein, 242 aa, Shigella dysenteriae
LKERKEGAFVPFVTLGDPGIEQSLKIIDTLIEAGADALELGIPFSDPLADGPTIQNATLRAFAAGVTPAQCFEMLALIRQKHPTIPIGLLMYANLVFNKGIDEFYAQCEKVGVDSVLVADVPVEESAPFRQAALRHNVAPIFICPPNADDDLLRQIASYGRGYTYLLSRAGVTGAENRAALPLNHLVAKLKEYNAAPPLQGFGISAPDQVKAAIDAGAAGAIFGSAIGKIIEQHINEPEKML

SEQ ID NO: 714 - protein, 223 aa, Lycopersicon esculentum
MGRGKIEIKRIENNTNRQVTFCKRRNGLLKKAYELSVLCDAEIALIVFSTRGRLYEYSNNNVKATIERYKKATAETSSAYTTQELNAQFYQQESKKLRQQIQMMQNTNRHLVGEGLSSLNVRELKQLENRLERGITRIRSKKHEAILAETEDLHKREIQLEQENAFLRSKIAENERLQELSMMPSGGEEYNAFQQYLARNMLQLNMMETALPSYDPLSPDHKR

SEQ ID NO: 715 - protein, 480 aa, Coleochloa abyssinica
PVVSTQNIGRIAQIIGPVLDVVFPPGKMPNIYNALVVKGRDTMGEQINVTCEVQQLLGNNRVRAVAMSATDGLTRGMEVIDTGAALSVPVGGTTLGRIFNVLGEPIDDLGPVDTSTTSPIHRPAPAFVELDTKLSIFETGIKVVDLLAPYRRGGKIGLFGGAGVGKTVLIMELINNIAKAHGGVSVFGGVGERTREGNDLYIEMKESGVINEKNLSESKVALVYGQMNEPPGARMRVGLTALTMAEYFRDVNKQDVLLFIDNIFRFVQAGSEVSALLGRMPSAVGYQPTLSTEMGSLQERITSTKKGAITSIQAVYVPADDLTDPAPATTFAHLDATTVLSRALAAKGIYPAVSPLDSTSTMLQPNIVGDEHYEIAQRVKQTSQRYKELQDIIAILGLDELSEEDRLTVARARKIERFLSQPFFVAEVFTGSPGKYVGLAETIRGFQLILSGELDALPEQAFYLVGNIDEAIAKAIKLEV

SEQ ID NO: 716 - protein, 310 aa, Methanothermococcus thermolithotrophicus
MMKAMYDGIQRPLTAIETETGSIFIPRGVHVPSLPRDVKWDFTPTVNVGDIVSEGDVIGTVPETPSIIHKIMVPVGVNGKVKEIKSGSFTVEETVAVIETENGDKEVTMMQKWPVRKPRPHKGKLPPIIPLITGQRVEDTFFGLAKGGTSAIPGPFGSGKTVTQHQLAKWSDVDVVVYIGCGERGNEMTEVIEEFPHLEDIKTVNKLMDRTVLIANTSNMPVAAREASVYTGITIAEYFRDMGYGVLLTADSTSRWAEAMREISGRLEEMPGEEGYPAYLASRLAQFYERAGRVNCLGSDDKQGFICIVG

SEQ ID NO: 717 - protein, 476 aa, Streptomyces avermitilis MA-4680
MRRSKIVCTLGPAVDSHEQLVTLIEAGMNVARFNFSHGTHAEHQGRYDRVRAAAAETGKAIGVLADLQGPKIRLETFAEGPVELVRGDEFIITTEDVPGDKHICGTTYKGLPGDVSKGDQILINDGNVELRVVEVDGPRVKTVVIEGGVISDHKGINLPGAAVNVPALSDKDIEDLRFALKMGCDLVALSFVRDASDVKDVHKVMDEEGRRVPVIAKVEKPQAVENMEAVVAAFDGVMVARGDLAVEYPLEKVPMVQKRLVELCRRNAKPVIVATQMMESMITNSRPTRAEASDVANAILDGADAVMLSAESSVGAYPIETVKTMSKIVTAAEEELLSKGLQPLVPGKKPRTQGGSVARAACEIADFLGGKGLVAFTKSGDTARRLSRYRAAQPILAFTTDEGTRNQLALSWGVESHVVPFVNSTDEMVDLVDSELQNLKRFNDGDVVVMTAGSPPGVPGTTNMVRVHHLGEGKRA

SEQ ID NO: 718 - protein, 402 aa, Coleochaete scutata
ILGDNKVRAVSMSATDGLMRGMDVIDTGAPLSVPVGEATLGRIFNVLGEPVDELGPVDATTTFPIHRSAPAFTQLDTKLSIFETGIKVVDLLAPYRRGGKIGLFGGAGVGKTVLIMELINNIAKAHGGVSVFGGVGERTREGNDLYMEMKESKVINEENISESKVALVYGQMNEPPGARMRVGLTALTMAEYFRDVNKQDVLLFIDNIFRFVQAGSEVSALLGRMPSAVGYQPTLSTEMGTLQERITSTKEGSITSIQAVYVPADDLTDPAPATTFAHLDATTVLSRGLAAKGIYPAVDPLDSTSTMLQPWIVGQEHYETAQGVKQTLQRYKELQDIIAILGLDELSEEDRLTVARARKIERFLSQPFFVAEVFTGSPGKYVSLVETIKGFQLILSGDLDAL

SEQ ID NO: 719 - protein, 455 aa, Prochlorococcus marinus subsp. pastoris str. CCMP1378
MAKFDAHLKCSFCGKSQDQVRKLIAGPGVYICDECIDLCNEILDEELIDTQAKINNSPQVKKKLPTNNSDKSIPLELTSIPKPLEIKTFLDNQVVGQESAKKILSVAVYNHYKRLAWRLKEENKENDSNDLQATKLQKSNILLIGPTGSGKTLLAQTLAEFLDVPFAVADATSLTEAGYVGEDVENILLRLLQKSEMNVDLAQKGIIYIDEIDKIARKSENPSITRDVSGEGVQQALLKMLEGTIANVPPQGGRKHPNHDCIQIDTSQILFICGGAFIGLEDIVQKRLGKNSIGFTTNPDESKINAKKIIDSRDALKNLEQDDLVKYGLIPEFIGRIPVCAVLDRLSKETLESILTEPRDALVKQFKTLLSMDNVELNFEPESVEAIANEAFKRKTGARALRSIIEELMLDLMYTLPSQEEVKEFIITKKMVDKLFLSKIVKLPAGSQRIIKESA

SEQ ID NO: 720 - protein, 242 aa, Cyanidium caldarium
MFIAYLTAGAPDLNTTKQALLNLANDGADVIEIGVPYSDPLADGMILQKASQQALKNRFRLEQLWHLLAEIELPVPVVILAYYNQIFHYGVEKWVTTLVNLKVKALIVPDLPYEEAAILRAACARHHLHMIWLISPTTPKVRAKQLALACDDWIYLVSRTGVTGVDAHFDNQIPNMIAELKQVTTTPIALGFGIHQKQQLQLVKSWGADGVIIGTACMQILLEKGVDQLTEWISAMKKSSYP

SEQ ID NO: 721 - protein, 224 aa, Streptococcus pneumoniae
MPKTLTEKLNAIKAAGKGIFVPYIMAGDHEKGLDGLAETIHFLEDLGVSAIEVGIPFSDPVADGPVIEEAGLRSLAHGTSTQALVETLKTIETEIPLVIMTYFNPLFQYGVENFVKDLADTAVKGLIIPDLPHEHANFVEPFLADTDITLIPLVSLTTGIERQKELIEGAEGFVYAVAINGVTGKSGNYRADLDKHLAQLHQVADIPVLTGFGVSSQADLERFN

SEQ ID NO: 722 - protein, 443 aa, Helicobacter pylori J99
MSKLNMTPREIVAYLDEYIIEQKEAKKFIAIALRNRYRRLQLEKSLQEEITPKNILMIGSTGVGKTEIARRMAKIMKLPFVKVEASKYTEVGFVGRDVESMVRDLVNNSVLLVENEHKERLKDKIEEAVVEKIAKKLLPPLPSGVSEEKKQEYANSLLKMQQRIAQGELDSREIEIEVRKKSIEIDSNVPPEILRVQENLIKVFHKEQDKVKKTLSVKEAKEALKAEISDTLLDGEAIKMEGLKRAESSGVIFIDEIDKIAVSSKEGSRQDPSKEGVQRDLLPIVEGSVVNTKYGSIKTEHILFIAAGAFHLSKPSDLIPELQGRFPLRVELENLTEEIMYMILTQTKTSIIKQYQALLKVEGVEIAFEDDAIKELAKLSYNANQKSEDIGARRLHTTIEKVLEDISFEAEDYSGQSVTITKELVQSKLGDLVADENLVKYIL

SEQ ID NO: 723 - protein, 205 aa, Juglans regia
KRRNGLLKKAYELSVLCDAEVALIVFSSRGRLYEYANNSVKSTIDRYKKARADSSNTGSVSEANTQFYQREAATLRQQINSVQESNRKMLGESLSGMAFRDLKSLESKLESGIRRIRSKKNELLFAEIEYMQKREVDLHNNNQLLRAKIAENERNQQNLNVMPGGGNLELMHSQPFDSRNYFQVDALQPNHDQYPRQDQMALQLV

SEQ ID NO: 724 - protein, 596 aa, Oryza sativa
  unsure (1)..(596): unsure at all Xaa locations
TRPNLKRHPLHGTRLPLLPPLRLLPSTSAAAPIAQLCAVGVVSVPMARKQHIAIFTTASLPWMTGTAVNPLFRAAYLAKAGDWEVTLVVPWLSKGDQLLVYPNKMKFSVPGEQEGYVRRWLEERIGLLPKFEIKFYPGKFSTEKRSILPAGDITQTVSDDKADIAVLEEPEHLTWYHHGRRWKNKFRKVIGVVHTNYLEYVKRERNGYIHAFLLKHINSWVTDIYCHKVIRLSAATQEVPRSIVCNVHGVNPKFIEIGKLKHQQISQREQAFFKGAYYIGKMVWSKGYTELLQLLQKHQKELSGLKMELYGSGEDSDEVKASAEKLNLDVRVYPGRDHGDSIFHDYKVFINPSTTDVVCTTTAEALAMGKIVICANHPSNEFFKRFPNCHMYNTEKEFVRLTMKALAEEPIPLSEELRHELSWEAATERFVRVADIAPIMSIKQHSPSPQYFMYISPDVKKNMEEASAFFHNAISGFETARCVFGAIPNTLQPDEQQCKELXLEAPGMTVISSHAVVNDNRMPTNSPGNLAWGTNYVTQLSFAPKLRRTEQTRVILVFCYGGTLVLQFSFTIVECPSDISYCNASYLGIVNVRQLK

SEQ ID NO: 725 - protein, 329 aa, Oryza sativa (japonica cultivar-group)
MEAPCSPSGKKRDKMRKKEIVLWCNIKALPGANRLIKHLKSNGVPAALASNSPGSNIEAKISCHQGWKESFSAIVGGDEVEKGKPSPDIFLEAAKRMNTNPPNCLVIEDSLCCSWKSCRNACIAVPSVPKRTAEFSSADEVINSLLDVRPEKWGLRPFSDWIDDTLPIEPWFIGGSVIKGFGRGSKVLGIPTANLPAENFSDVLSEHTSRVYFGWAGLSTRGIYKMVMSIGWNPYFDNTEKTIEPWLLHDFGEDFYGEELRLVIVGYIRPEANFPSLESLIERIHEDARIAEKALNLPLYAKYTDSPYLRNSLKEDNSANGNQSVIDSK

SEQ ID NO: 726 - protein, 556 aa, Triticum aestivum
  unsure (1)..(556): unsure at all Xaa locations
LVPLLEFNPHLREQKLELHPRWRPALELVDPPGCRNSAPEVYVMLPLDAVSVNNRFEKGDELREQLKRLVEAGVDGVMVDVWWGLVEGKGPRAYDWSAYKQLFQLVHEAGLKLKAIMSFHQCGGNVGDVVNIPIPQWVLNVGASDPDIFYTDQHGTRNIEYLTLGXVDDQPLXFHGRSAVQMYTDYMASFRDNMKEFLDAXGVIVDIEVGLGPAGEXRYPSYPQSHGWSFPGIGEFICYDKYLQADFKAAAAMVGHPEWEFPRDAGQYNDAPQRTRFFVDNGTYLTEQGRFFLAWYSNNLIKHGDKILDEANKVFLGHRVQLAIKISGIHWWYKVPSHAAEITAGYYNLHDRDGYRPIARMLKRHRASLNFTCAEMRDSEQSSQAMSAPEELVQQVLSAGWREGLNMACENALPRYDPTAYNTILRNARPHGINKSGPPEHKLFGFTYLRLSNQLVEGQNYVNFKTFVDRMHANLPHDPCVDPVAPLQRSGPELTIEMILQAAQPKLDPFPFEEHTDLPVQGLGGIGGDVEGPTGGMGGEVQDPTGSMGGELPATV

SEQ ID NO: 727 - protein, 756 aa, Pisum sativum
MWKLKVAEGGTPWLRTLNNHVGRQVWEFDPHSGSPQDLDDIETARRNFHDNRFTHKHSDDLLMRLQFAKENPMNEVLPKVKVKDVEDVTEEAVATTLRRGLNFYSTIQSHDGHWPGDYGGPMFLMPGLVITLSVTGALNAVLTDEHRKEMRRYLYNHQNKDGGWGLHIEGPSTMFGSVLCYVTLRLLGEGPNDGEGDMERGRDWILEHGGATYITSWGKMWLSVLGVFEWSGNNPMPPEIWLLPYALPVHPGRMWCHCRMVYLPMSYLYGKRFVGPITPTVLSLRKELFTVPYHDIDWNQARNLCAKEDLYYPHPLVQDILWATLHKFVEPVFMNWPGKKLREKAIKTAIEHIHYEDENTRYICIGPVNKVLNMLCCWVEDPNSEAFKLHLPRIYDYLWVAEDGMKMQGYNGSQLWDTAFAAQAIISTNLIDEFGPTLKKAHAFIKNSQVSEDCPGDLSKWYRHISKGAWPFSTADHGWPISDCTAEGLKAVLLLSKIAPEIVGEPLDSKRLYDAVNVILSLQNENGGLATYELTRSYTWLEIINPAETFGDIVIDCPYVECTSAAIQALATFGKLYPGHRREEIQCCIEKAVAFIEKIQASDGSWYGSWGVCFTYGTWFGIKGLIAAGKNFSNCLSIRKACEFLLSKQLPSGGWAESYLSCQNKVYSNLEGNRSHVVNTGWAMLALIEAEQAKRDPTPLHRAAVCLINSQLENGDFPQEEIMGVFNKNCMITYAAYRCIFPIWALGEYRRVLQAC

SEQ ID NO: 728 - protein, 309 aa, Triticum aestivum
MAVGNGGAKKVVAPMEVSVEAGNAGDAAWMDDDGRPRRSGTFWTASAHIITAVIGSGVLSLAWAIAQLGWVAGPAVMLLFAAVIYYTSTLLAECYRTGDPATGKRNYTYMDAVRSNLGGPKVIFCGVIQYANLVGVAIGYTIASSISMRAGRRADCFHANGHADPCKSSSNPYMILFGLVQIVFSQIPDFDQIWWLSIVAAVMSFTYSGIGLSLGITQTISNGGIKGSLTGISIGVGITATQKVWRSLQAFGDIAFAYSFSNILIEIQDTIRAPPPSEAKVMKQATRLSVATTTVFYMLCGCMGYAAFG

SEQ ID NO: 729 - protein, 500 aa, Streptococcus mutans UA159
MNKRVKIVATLGPAVEIRGGKKFGEDGYWGEKLDVEASAAKIAELITEGANVFRFNFSHGDHAEQGERMATVRRAEELARQKVGFLLDTKGPEMRTELFADGVKEYEYKTGDKLRIATKQGIESTKDVIALNVAGGLDIYDDVAVGQTILIDDGKLGLTVTAKDITTREFEVTVENDGIIAKQKGVNIPNTKIPFPALAERDNADIRFGLEQGLNFIAISFVRTAKDVNEVRQICKETGNEHVKLFAKIENQQGIDNIDEIIDAADGIMIARGDMGIEVPFEMVPVYQKMIITKVNAAGKSAITATNMLETMTDKPRATRSEVSDVFNAVIDGTDATMLSGESANGKYPVEAVRTMATIDKNAQTLLNEYGRLNSDNLPRTNKTEVVASAVKDATKSMDIKLVVTITESGNTARLISKYRPDADILALTFDEKVQKSLMINWGVIPILTEKPASTDDMFEIAEKAALKSGLVESGDNIVIVAGVPVGSGGTNTMRVRTVQ

SEQ ID NO: 730 - protein, 248 aa, Arabidopsis thaliana
MEGGASNEVAESSKKIGRGKIEIKRIENTTNRQVTFCKRRNGLLKKAYELSVLCDAEVALVIFSTRGRLYEYANNSVRGTIERYKKACSDAVNPPTITEANTQYYQQEASKLRRQIRDIQNLNRHILGESLGSLNFKELKNLESRLEKGISRVRSKKHEMLVAEIEYMQKRVKEIELQNDNMYLRSKITERTGLQQQESSVIHQGTVYESGVTSSHQSGQYNRNYIAVNLLEPNQNSSNQDQPPLQLV

SEQ ID NO: 731 - protein, 402 aa, Coleochaete irregularis
LLGDNKVRAVSMSATDGLMRGMDAIDTGAPLSVPVGEATLGRIFNVLGEPVDELGPVDTSKVSPIHRPAPAFTQLDTKLSIFETGIKAVDLLAPYRRGGKIGLFGGAGVGKTVLIMELINNIAKAHGGVSVFGGVGERTREGNDLYMEMKESIVINSDNLSESKVALVYGQMNVPPGARMRVGLTALTMAEYFRDVNKQDVLLFIDNIFRFVQAGSEVSALLGRMPSAVGYQPTLSTEMGTLQERITSTKEGSITSIQAVYVPADDLTDPAPATTFAHLDATTVLSRGLAAKGIYPAVDPLDSTSTMLQPWIVGEEHYETAQGVKKTLQRYKELQDIIAILGLDELSEEDRLIVARARKIERFLSQPFFVAEVFTGSPGKYVSLVETIKGFQMILSGDLDAL

SEQ ID NO: 732 - protein, 503 aa, Triticum aestivum
MAGNMLANYVQVYVMLPLDVVSVDNKFEKGDEIRAQLKKLTEAGVDGVMIDVWWGLVEGKGPKAYDWSAYKQVFDLVHEAGLKLQAIMSFHQCGGNVGDVVNIPIPQWVRDVGATDPDIFYTNRGGTRNIEYLTLGVDDQPLFHGRTAVQMYADYMASFRENMKKFLDAGTIVDIEVGLGPAGEMRYPSYPQSQGWVFPGIGEFICYDKYLEADFKAAAAKAGHPEWELPDDAGEYNDTPEKTQFFKDNGTYLTEKGKFFLSWYSNKLIKHGDKILDEANKVFLGCRVQLAIKISGIHWWYRVPNHAAELTAGYYNLDDRDGYRTIARMLTRHHASMNFTCAEMRDSEQSEEAKSAPEELVQQVLSAGWREGLHVACENALGRYDATAYNTILRNARPKGINKNGPPEHKLFGFTYLRLSNELLEGQNYATFQTFVEKMHANLGHDPSVDPVAPLERSKPEMPIEMILKAAQPKLEPFPFDKNTDLPVKDHTDVGDEVLVAPV

SEQ ID NO: 733 - protein, 508 aa, Mycoplasma genitalium
MIDHLKRTKIIATCGPALTKSLVSLKMLDDNEYAAIKKVAYANIEAIIKSGVSVIRLNFSHGTHEEQQVRIKIVRDVAKAMNIPVSIMLDTNGPEIRIVETKKEGLKITKDSEVIINTMSKMIASDNQFAVSDASGKYNMVNDVNIGQKILVDDGKLTLVVTRVDKQHNQVICVAKNDHTVFTKKRLNLPNAQYSIPFLSEKDLKDIDFGLSQGIDYIAASFVNTVADIKQLRDYLKLKNASGVKIIAKIESNHALNNIDKIIKASDGIMVARGDLGLEIPYYQVPYWQRYMIKACRFFNKRSITATQMLDSLEKNIQPTRAEVTDVYFAVDRGNDATMLSGETASGLYPLNAVAVMQKIDKQSETFFDYQYNVNYYLKNSTANKSRFWHNVVLPLTKKTVPKRKLVNSAFKYDFIVYPTNNINRIYALSNARLAAAVIILTNNKRVYTGHGVDYGIFCYLIDKNPNQLTKAELIELAWKAINHYQAYGDLEKLKQCLAVYNETIINL

SEQ ID NO: 734 - protein, 485 aa, Balanops vieillardi
SGPGVSALEKKNLGRITQIIGPVLDVAFPPGKMPNIYNALVVKGRDAVGQQINVTCEVQQLLGNNRVRAVAMSATDGLMRGMEVIDTGTPLSVPVGGATLGRIFNVLGEPVDDLGPVDTRTTSPIHRSAPAFIQLDTKLSIFETGIKVVDLLAPYRRGGKIGLFGGAGVGKTVLIMELINNIAKAHGGVSVFGGVGERTREGNDLYMEMKESGVINEENIAESKVALVYGQMNEPPGARMRVGLTALTMAEYFRDVNEQDVLLFIDNIFRFVQAGSEVSALLGRMPSAVGYQPTLSTEMGTLQERITSTKEGSITSIQAVYVPADDLTDPAPATTFAHLDATTVLSRGLAAKGIYPAVDPLDSTSTMLQPQIVGEEHYETAQRVKQTLQRYKELQDIIAILGLDELSEEDRLTVARARKIERFLSQPFFVAEVFTGSPGKYVGLAETIRGFKLILSGELDSLPEQAFYLVGNIDEATAKATTLEM

SEQ ID NO: 735 - protein, 298 aa, Glycine max
MQIFIGRQGALVCFWLLSVFFVVTGFNNEEHRTVEVVGLGECADCRQNNIKNNHAFSGLRVTVDCKSRHGHFRTRGAGALDEYGNFKVSLPQDMVEDGELKEDCYAQLHSASAEPCPSHGNSKIVTRSVSEDTHTLAPAAGKLRFSSALCTSAFFWHFFKHHPEFPYPPKDDYSLPPPVPVYKEPLPPVPVYKKPPAPYKKPPISTPSPVVNKPCPPKEKTPSPTPIYKPLPPPTPIYKPLPPPTPIYEPTPTAPSPPYFKYFPPFHFKKPCPPLPKMEPPKFFYQHPWFGNWPPSHS

SEQ ID NO: 736 - protein, 488 aa, Psidium guajava
MARVVMSNMSPAMSSTYPPSLSPPSSPRPTTLPVRTIPGSYGWPLLGPISDRLDYFWFQGPETFFRKRIEKYKSTVFRANVPPCFPFFSNVNPNVVVVLDCESFAHLFDMEIVEKSNVLVGDFMPSVKYTGNIRVCAYLDTSEPQHAQVKNFAMDILKRSSKVWESEVISNLDTMWDTIESSLAKDGNASVIFPLQKFLFNFLSKSIIGADPAASPQVAKSGYAMLDRWLALQLLPTINIGVLQPLVEIFLHSWAYPFALVSGDYNKLYQFIEKEGREAVERAKAEFGLTHQEAIHNLLFILGFNAFGGFSIFLPTLLSNILSDTTGLQDRLRKEVRAKGGPALSFASVKEMELVKSVVYETLRLNPPVPFQYARARKDFQLKSHDSVFDVKKGELLCGYQKVVMTDPKVFDEPESFNSDRFVQNSELLDYLYWSNGPQTGTPTESNKQCAAKDYVTLTACLFVAYMFRRYNSVTGSSSSITAVEKAN

SEQ ID NO: 737 - protein, 485 aa, Ilex crenata
  unsure (1)..(485): unsure at all Xaa locations
GSGVSTLEKKNLGRISQIIGPVLDVAFPPGKIPNIYNALVVXGRDTVGQPINVTCEVQQLLGNNRVRAVAMSATDGLTRGMEVIDTGAPLSVPVGGATLGRIFNVLGEPVDNLGPVDTRTTSPIHRSAPAFIQLDTKLAIFETGIKVVDLLAPYRRGGKIGLFGGAGVGKTVLIMELINNIAKAHGGVSVFGGVGERTREGNDLYMEMKESGVINEQNIAESKVALVYGQMNEPPGARMRVGLTALTMAEYFRDVNEQDVLLFIDNIFRFVQAGSEVSALLGRMPSAVGYQPTLSTEMGTLQERITSTKEGSITSIQAVYVPADDLTDPAPATTFAHLDATTVLSRGLAAKGIYPAVDPLDSTSTMLQPRIVGEEHYETAQKVKETLQRYKELQDIIAILGLDELSEDDRLSVARARKIERFLSQPFFVAEVFTGSPGKYVGLAETIRGFQLILSGELDGLPEQAFYLVGNIDEATAKAMNLEVE

SEQ ID NO: 738 - protein, 480 aa, Medicago sativa
MSLPPPIPPPSLATPPKARPTELPIRQIPGSHGWPLLGPLSDRLDYFWFQKPENFFRTRMEKYKSTVFRTNVPPTFPFFTNVNPNIIAVLDCKSFSHLFDMDLVDKRDVLVGDFVPSVEFTGNIRVGVYQDVSEPQHAKAKNFSMNILKQSSSIWVPELISNLDIFLDQIEATLSNSSSASYFSPLQKFLFTFLSKVLARADPSLDPKIAESGSSMLNKWLAVQLLPTVSVGTIQPLEEIFLHSFSYPYALVSGDYKNLYNFIKQHGKEVIKNGTEFGLSEDEAIHNLLFVLGFNSYGGFSIFLPKLIESITNGPTGLQEKLRKEAREKGGSTLGFDSLKELELINSVVYETLRMNPPVPLQFGRARKDFQLSSYDSAFNVKKGELLCGFQKLVMRDPVVFDEPEQFKPERFTKEKGAELLNYLYWSNGPQTGSPTVSNKQCAGKDIVTFTAALIVAHLLRRYDLIKGDGSSITALQKAK

SEQ ID NO: 739 - protein, 497 aa, Olea europaea
  unsure (1)..(497): unsure at all Xaa locations
XXXXXXXXXSGVSTLEKKNLGRIVQIIGPVLDVAFSPGKMPNIYNALVVKGRDTIGQPINVTCEVQQLLGNNRVRAVAMSATDGLMRGMEVIDTRAPLSVPVGGATLGRIFNVLGEPVDNLGPVDTRTTFPIHRSAPAFIQLDTKLSIFETGIKVVDLLAPYRRGGKIGLFGGAGVGKTVLIMELINNIAKAHGGVSVFGGVGERTREGNDLYMEMKESGVINEENIAESKVALVYGQMNEPPGARMRVGLTALTMAEYFRDVNEQDVLLFIDNIFRFVQAGSEVSALLGRMPSAVGYQPTLSTEMGTLQERITSTKEGSITSIQAVYVPADDLTDPAPATTFAHLDATTVLSRGLAAKGIYPAVDPLDSTSTMLQPRIVGEEHYEIAQRVKQTLQRYKELQDIIAILGLDELSEEDRLTVARARKIERFLSQPFFVAEVFTGSPGKYVGLAETIRGFQLILSGELDGLPEQAFYLVGNIDEAATKAMNLEMESNLK

SEQ ID NO: 740 - protein, 275 aa, Arabidopsis thaliana
MDLLKTPSSTVGLSETFARLKSQGKVALIPYITAGDPDLSTTAKALKVLDSCGSDIIELGVPYSDPLADGPAIQAAARRSLLKGTNFNSIISMLKEVIPQLSCPIALFTYYNPILRRGVENYMTVIKNAGVHGLLVPDVPLEETETLRNEARKHQIELVLLTTPTTPKERMNAIVEASEGFIYLVSSVGVTGTRESVNEKVQSLLQQIKEATSKPVAVGFGISKPEHVKQVAEWGADGVIVGSAMVKILGESESPEQGLKELEFFTKSLKSALVS

SEQ ID NO: 741 - protein, 440 aa, Triplochiton zambesiacus
  unsure (1)..(440): unsure at all Xaa locations
VGQQXNVXXEVQQLLGNNRVRAVAMXATDGLTRGMEVIDTGAPLSVPVGGATLGRIFNVLGEPVDNLGPVDTRTTSPIHKPAPAFIQLDTKLSIFETGIKVVDLLAPYRRGGKIGLFGGAGVGKTVLIMELINNIAKAHGGVSVFGGVGERTREGNDLYMEMKESGVINEQNLAESKVALVYGQMNEPPGARMRVGLTALTMAEYFRDVNEQDVLLFIDNIFRFVQAGSEVSALLGRMPSAVGYQPTLSTEMGSLQERITSTXEGSITSIQAVYVPADDLTDPAPATTFAHLDATTVLSRGLAAKGIYPAVDPLDSTSTMLQPRIVGEEXYETAQRVKQTLQRYKELQDIIAILGLDELSEEDRLTVARARKIERFLSQPFFVAEVFTGSPGKYVGLAETIRGFKLILSGELDGLPEQAFYLVGNIDEATAKXTNLEMES

SEQ ID NO: 742 - protein, 493 aa, Adiantum capillus-veneris
MKISSPLFEISELVEKNVGYITQIIGPVLDVAFSPGEMPSIYNSLVVKGRNSAGQEINVTCEVQQLLGNNEVRAVATSATDGLMRGMGAVDTGAPLSVPVGETTLGRIFNVLGEPVDNLGPVQNSATFPIHRSAPAFTQLDTKLSIFETGIKVVDLLAPYRRGGKIGLFGGAGVGKTVLITESINNIAKAHGGVSVFGGVGERTREGNDLYMETKESKVINEQNISESKVALVYGQMNEPPGARMRVGSTALTMAEYFRDINKRDVLLFIDNIFRFVQAGSEVSALLGRMPSAVGYQPTLGTEMGSLQERITSTKEGSITSIQAVYVPADDLTDPAPATTFAHLDATTVLSRGLAAKGIYPAVDPLDSTSTMLQPWIVGEEHYETAQGVKQTLQRYKELQDIIAILGLDELSEEDRLTVARARKIERFLSQPFFVAEVFTGSPGKYVSLPETIKGFQMILPGELDNLPEQAFYLVGNIDEAAAKAAALQAGGQ

SEQ ID NO: 743 - protein, 376 aa, Carteria radiosa
VSMNPTEGLMRGMEVLDTGKPLSVPVGKVTLGRIFNVLGDPIDNLGPVNAEETLPIHRTAPAFVDLDTRLSIFETGIKVVDLLAPYRRGGKIGLFGGAGVGKTVLIMELINNIAKAHGGVSVFAGVGERTREGNDLYTEMKESGVIVEKNLADSKVALVYGQMNEPPGARMRVALTALTMAEYFRDVNKQDVLFFIDNIFRFVQAGAEVSALLGRMPSAVGYQPTLATEMGTLQERITSTKDGSITSIQAVYVPADDLSDPAPSTTFTHLDATTVLSRNLAAKGIYPAVDPLESTSTMLQPWIVGDKHYDCARSVKKTLQRYKELQDIIAILGLDELSEEDRLVVARARRIERLLSQPFFVAEVFTGSPGKYVSLA

SEQ ID NO: 744 - protein, 625 aa, Triticum aestivum
  unsure (1)..(625): unsure at all Xaa locations
MAHGDRMTTFEEGERESEYGYVRKVSGPVVVADGMGGAXAMYELVRVGHDSLIGEIIRLEGDSATIQVYEETAGLTVNDPVLXTKKPLSCELGCVILWNVFNXFEGIGKLLKLSXGNLYIPRDNSLPGLAXERKCDAEGNKINYADCTSLMGNRFYGLENKMFHDPVAAHLVLIANLRYGKLDXTSGSGIMETRISELELKERVCVLTVLLIRTAQASLRVAANITLDTPNLRRHDLLVPIPSPVFGGTCAIPGAFGIVKTVISQALSKYSNSDTVVYVGCGERGNEMAEVLMDFPQLTMTLPDGREESVMKRTTLVANTSNMPVAAREASIYTGITIAEYFRDMGYNVSMMADSTSRWAEALREISGRLAEMPADSGYPAYLASRLASFYERAGKVQCLGSPDRTGSVTIVGAVSPPGGDFSDPVTSATLSIVQVFWGLDKKLAQRKHFPSVNWLISYSKYSTALEGYYEKFDPGFIDMRTKAREVLQREDDLNEIVQLVGKDALGESDKITLETAKLLREDYLAQNAFTPYDKYCPFYKSVWMMRNIIHFNTLANQAVERAANADGHKITYAVIKSRMGDLFYRLVSQKFEDPAEGEDALIAKFQKLYDDLTTGFRNLEDEAR

SEQ ID NO: 745 - protein, 431 aa, Clostridium tetani E88
MDMAKNDDKKQLKCSFCGKKQDQVKRLVAGPGVYICDECIELCSEIITDELEEDINTDMSSLPKPSEIKSYLDDYVIGQDDAKKALSVAVYNHYKRINLNNVNDDVELQKSNILLLGPTGSGKTLLAQTMAKFLNVPFAIADATTLTEAGYVGEDVENILLKLIQNADYDIEKAERGIIYIDEIDKIARKSENPSITRDVSGEGVQQSLLKILEGTIASVPPQGGRKHPHQEFIQLNTTNILFICGGAFDGVDKLIERRTRNSSLGFGADIKSKRDENVGELLKKIMPEDLLKFGLIPEFIGRLPITVTLSALDRDALVEILTEPKNALVKQYKKLFEMDNVHLEFKEEALKAIAEEAIRRSTGARGLRSIIEEIMKDIMFEIPSDESISKVIINEETVSNKNPELIEAEGGKRPPIKIKKPRAKKGNETA

SEQ ID NO: 746 - protein, 490 aa, Nostoc sp. PCC 7120
MLIFEEHFQDNRCSWVTRDSEECSLCMDVSHYVFDHKRAGDTYWLSWNSAEFFYERTNFHIHIVLEKAAGVDDHGYGFVWGLSDVSNFFEFVISGNGHYRITEIKDGNFINYTDWKRCDRIHRSDSVNLLEITRVGNMVEFYINSTLVDKFPADKLVDVSGKNFGFVIHDKIKMKVHSLIVSAPDTEKESVDSHSDTRDSKQETKASFVEHDPPEKDTVEAVFADLKALVGHEQTKHQLFSLANYLKVQTERRKRGLKIVDTSLHLMLYGPPGTGKTTIARLVGRLYKQMGFFPRGHVVETDRAGIIGGYIGQTALRMESAVHQAIGGVLFIDEAHALAAEDTPSDFGKEALQILIKRMEDYRDHMAVVVAGYTDEMDRLLELNPGFKSRLNRLFYLDHYTPNQLLLIFKKFCQDNGYILDSSAIIVLQATFEVAYAKRDKSFGNGRFARALFERSIEQQANRIVTHLQELDDYEINLILAEDLSFIEFK

SEQ ID NO: 747 - protein, 479 aa, Glycine max
  unsure (1)..(479): unsure at all Xaa locations
MMENGGKQTFEVSNDTLQRVGSKSFDDDGRLKRTGTIWTASAHIITAVIGSGVLSLAWAIAQLGWIAGPVVMILFSIVTYYTSTLLATCYRSGDQLRGKRNYTYTPAFXSFLGGFSVKFCGWVQYGNLFGVAIGYTIAASISMMAVKRSNCYHSSGGKNPCKMNSNWYMISYGVAEIIFSQIPDFHELWWLSIVAAVMSFTYSFIGLGLGIGKVIGNGRIKGSLTGVTIGTVTESQKIWRTFQALGNIAFAYSYSMILIEIQDTIKSPPAESETMSKATLISVLVTTVFYMLCGCFGYASFGDASPGNLLTGFGFYNPFWLIDIANAGIVIHLVGAYQVYCQPLFSFVESNAAERFPNSDFMSREFEVPIPGCKPYKLNLFRLVWRTLFVILSTVIAMLLPFFNDIVGLIGAIGFWPLTVYLPVEMYITQTKIPKWGIKWIGLQMLSVACFVITILAAAGSIAGVIDDLKVYKPFVTSY

SEQ ID NO: 748 - protein, 463 aa, Primula sieboldii
  unsure (1)..(463): unsure at all Xaa locations
QIIGPVLDVSFPPGKMPNIYNALVVKGRNTAGQPINVTCEVXQLLGNNRVRAVAMSATDGLTRGMEVIDTGAALSVPVGGATLGRIFNVLGEPVDNLGPVDTRTTSPIHRSAPAFIQLDTKLSIFETGIKVVDLLAPYRRGGKIGLFGGAGVGKTVLIMELINNIAKAHGGVSVFGGVGERTREGNDLHMEMKESGVINEENIAESKVALVYGQMNEPPGARMRVGLTALTMAEYFRDVNEQDVLLFIDNIFRFVQAGSEVSALLGRMPSAVGYQPTLSTEMGSLQERITSTKEGSITSIQAVYVPADDLTDPAPATTFAHLDATTVLSRGLASKGIYPAVDPLDSTSTMLQPRIVGEEHYETAQRVKETLQRYKELQDIIAILGLDELSEEDRLTVARARKIERFLSQPFFVAEVFTGSPGKYVGLAEPIRGFQLILSGKLDGLPEQAFYLVGNIDEAAAXA

SEQ ID NO: 749 - protein, 470 aa, Vibrio vulnificus CMCP6
MKKTKIVCTIGPKTESVEKLTELVNSGMNVMRLNFSHGDYVEHGTRIANFRQVMENTGKQLAILLDTKGPEIRTIKLENGDDVDLVAGQEFTFTTDTSVVGNKDIVAVTYPGFAADLSAGNTILVDDGLIEMEVIATTATEVKCKVLNNGALGENKGVNLPGVSVNLPALSEKDKNDLKFGCEQGVDFVAASFIRKASDVKEIREVLAANGGANIQIISKIENQEGVDNFDEILELSDGIMVARGDLGVEIPAEEVIFAQKMMIEKCNRARKVVITATQMLDSMIKNPRPTRAEAGDVANAIMDGTDAVMLSGETAKGKYPVEAVTIMAQIANRTDSVLKAELGSRLDSPRLRITEAVCKGAVDTAEKLAAPLIIVATEGGKSARSVRKYFPTANILALTTNKKTAAQLVLTKGVTPVVVDSIDNTDAFYVTGKELALESGLGSKGDIVVMVSGALVASGTTNTASVHVL

SEQ ID NO: 750 - protein, 483 aa, Carya glabra
SGPGVSALEKKNLGRIAQIIGPVLDVSFPPGKMPNIYNALVVKGRDTTGQQINVTCEVQQLLGNNRVRAVAMSATDGLMRGMEVIDTGASLSVPVGGATLGRIFNVLGEPVDNLGPVDTRTTSPIHRSAPAFIQLDTKLSIFETGIKVVDLLAPYRRGGKIGLFGGAGVGKTVLIMELINNIAKAHGGVSVFGGVGERTREGNDLYMEMKESGVINEQNIAESKVALVYGQMNEPPGARMRVGLTALTMAEYFRDVNEQDVLLFIDNIFRFVQAGSEVSALLGRMPSAVGYQPTLSTEMGSLQERITSTKAGSITSIQAVYVPADDLTDPAPATTFAHLDATTVLSRGLAAKGIYPAVDPLDSTSTMLQPRIVGEEHYETAQRVKQTLQRYKELQDIIAILGLDELSEEDRLTVARARKIERFLSQPFFVAEVFTGSPGKYVGLAETIRGFQLILSGELDGLPEQAFYLVGNIDEATAKATNL

SEQ ID NO: 751 - protein, 339 aa, Arabidopsis thaliana
MSSAIVVSQDAESLGLQIYSRKEKSLGVLVSNFLRLYNRDDVDLIGLDDAAGQLGVERRRIYDVVNILESIGIVARRGKNQYSWKGFGEIPRSLDELKEEGMRERLGYSSSNNSDKVSNGCEREEPLTLTPDDQENSSSSKMDQKKEKSLWLLAQNFVKMFLCSDDDLITLDSAAKALLSDSPDSVHMRTKVRRLYDIANVFASMNLIEKTHIPVTRKPAYRWLGSKSIAERGLSLFNSGEPKRVFGTEITNLRAKRNKTYCSSIRKQIGYKKHDEENTEQESKPAASKYVFGPFSPIGASKTNNDKVGKGRLLEIEALASTYQPQYCNQGNNHTLIVS

SEQ ID NO: 752 - protein, 368 aa, Medicago sativa
MPSFFAPTRRFSLASPLLLLGLFTINLIPTADAQIGVCYGMMGNNLPPANEVIDLYKANNIKRMRLYDPNQAALNALRNSGIELILGVPNSDLQSLATNSDNARQWVQRNVLNFWPSVKIKYIAVGNEVSPVGGSSWLGQYVLPATQNIYQAIRAKNLHDQILVSTAIDMTLIGNSFPPSKGSFRNDVRAYLDPFIGYLVYAGAPLLVNVYPYFSHVGNPRDISLPYALFTSPGVMVQDGPNGYQNLFDAMLDSVHAALDNTGIGWVNVVVSESGWPSDGGATSYDNARIYLDNLIRYEGKGTPRRPWATETYIFAMFDENQKSPELEKHFGVFYPNKQKKYPFGFGGERMGIVNGDFNATISLKSDM

SEQ ID NO: 753 - protein, 333 aa, Schedonorus pratensis
MAKHGAFAAALVVGLLAAIPAAVESIGVCYGVNGDRLPSASEVVQLYKSNGITGMRVYNVNDNTRPEGPERQQPRPHPRHRQHTAQCPRFQRLQRGHVGQLVKANVQSQQGLAIKYIAVGNEVPNQGGNTADILPAMKNIQAALVRAGLGGIKVSTAVHSGVTQGFPPSQGTFSAAHMPPIAQYLASIDSPLLANIYPYISFKGTPSIDIKYALFTAPGTVVTDGRNSYQNLFDALIDTMYSALESAGAGSVPIVVSESGWPSAGDLDATAANARTYNQNLINHVGKGDPKKPGAIEAYIFAMFNENLKGGLETEKHFGLFNADKSPAYSINF

SEQ ID NO: 754 - protein, 91 aa, Saccharomyces pastorianus
ISQSLSKYSNSDAIIYVGCGERGNEMAEVLMEFPELYTEMSGTKEPIMKRTTLVANTSNMPVAAREASIYTGITLAEYFRDQGKNVSMIAD

SEQ ID NO: 755 - protein, 420 aa, Arabidopsis thaliana
MATNYNEKLLLNYVPVYVMLPLGVVNVENVFADPETLETQLKRLKEEAGVDGVMVDVWWGIIESKGPKQYDWTAYKTLFQLIARLGLKIQAIMSFHQCGGNVGDIVTIPIPQWVRDVGDNDPDIYYTNRKGTRDIEYLSIGVDNLPLFAGRTAVQLYSDYMSSFKENMADLIEAGVIVDIEVGLGPAGELRYPSYPQSQGWVFPGIGEFQCYDKYLKKDFKEAAAKAGHPEWDLPEDAGEYNDKPEETGFFKKDGTYVSEKGKFFMTWYSNKLIFHGDQILGEANKIFAGLKVNLAAKVSGIHWLYNHHSHAAELTAGYYNLFKRDGYRPIARMLSKHYGILNFTCLEMKDTDNTAEALSAPQELVQEVLSKAWKEGIEVAGENALETYGAKGYNQILLNARPNGVNPNGLLWRRSEVRA

SEQ ID NO: 756 - protein, 484 aa, Anagallis tenella
GISSLEKKNLGRFIQIIGPVLDVSFPPGKMPNIYNALVVKGRDTAGQPINVTCEVQQLLGNNRVRAVAMSATEGLTRGMEVIDIGAALSVPVGGATLGRIFNVLGEPVDNLGPVDTRTTSPIHRSAPAFIQLDTKLSIFETGIKVVDLLAPYRRGGKIGLFGGAGVGKTVLIMELINNIAKAHGGVSVFGGVGERTREGNDLYMEMKESGVINEENIAESKVALVYGQMNEPPGARMRVGLTALTMAEYFRDVNEQDVLLFIDNIFRLVQAGSEVSALLGRMPSAVGYQPTLSTEMGSLQERITSTKEGSITSIQAVYVPADDLTDPAPATTFAHLDATTVLSRGLAAKGIYPAVDPLDSTSTMLQPRIVGEEHYEIAQRVKQTLQRYKELQDIIAILGLDELSEEDRLTVARARKIERFLSQPFFVAEVFTGSPGKYVGLAETIRGFQLILSGEFDGLPEQAFYLVGNIDEATAKAMKLEMES

SEQ ID NO: 757 - protein, 419 aa, Actinobacillus pleuropneumoniae serovar 1 str. 4074
MANFEKEPHCSFCGKRRTEVDQLVEGTEGYICNHCIEESYALLNGEEEPLIDEKQDEQKFFENVPTPHEINAHLDEYVIGQEHAKKVLSVAVYNHYKRLRNALSGHKETNGVELGKSNILLIGPTGSGKTLLAETLARRLNVPFAVADATTLTQAGYVGEDVENVIQKLLMKCDFDAEQAERGIVFIDEIDKITRKSESPSITRDVSGEGVQQALLKLIEGTVANINPQGSRKHPKGETIPVDTSKILFICGGAFAGLDKIVEARSNKQGGIGFGAELKKDKEREDLTELFKQVEPEDLVKFGLIPELIGRLPVVTPLQELDEEALIQILTEPKNAIIKQYQALFQMEGVELKFTKEALIAIAQKSISRKTGARGLRSIVENLLLDTMYNLPTLKAEKNVKKVTVGKGCVENGDKPKVE

SEQ ID NO: 758 - protein, 475 aa, Fusobacterium nucleatum subsp. nucleatum ATCC 25586
MRSLKKTKIVCTIGPVTESVETLKELLNRGMNVMRLNFSHGDYEEHGMRMKNFRQAMSETGIRGGILLDTKGPEIRTMTLKDGKDVSIKAGQKFTFTTDQSVVGDNERVAVTYENFAKDLKVGNMVLVDDGLLELDVVEIKGNEVICIARNNGDLGQKKGINLPNVSVNLPALSEKDIEDLKFGCQNNVDFVAASFIRKADDVRQVRKVLRENDGERIQIISKIESQEGLDNFDEILAESDGIMVARGDLGVEIPVEEVPCAQKMMIRKCNRVGKTVITATQMLDSMIKNPRPTRAEANDVANAILDGTDAVMLSGETAKGKYPLAAVEVMNKIAKKVDATIPPFYIEGVINKNDITSAVAEGSADISERLNAKLIVVGTESGRAARDMRRYFPRAHILAITNNEKTANQLVLSRGIISYVDASPKTLEEFFVVAESVAKKLNLVKNNDIIIATCGESVFIQGTTNSIKVIQVKA

SEQ ID NO: 759 - protein, 466 aa, Arabidopsis thaliana
MDVPRPAFKCFDDDGRLKRSGTVWTASAHIITAVIGSGVLSLAWAIGQLGWIAGPTVMLLFSFVTYYSSTLLSDCYRTGDPVSGKRNYTYMDAVRSILGGFRFKICGLIQYLNLFGITVGYTIAASISMMAIKRSNCFHESGGKNPCHMSSNPYMIMFGVTEILLSQIKDFDQIWWLSIVAAIMSFTYSAIGLALGIIQVAANGVVKGSLTGISIGAVTQTQKIWRTFQALGDIAFAYSYSVVLIEIQDTVRSPPAESKTMKIATRISIAVTTTFYMLCGCMGYAAFGDKAPGNLLTGFGFYNPFWLLDVANAAIVIHLVGAYQVFAQPIFAFIEKQAAASFPDSDLVTKEYEIRIPGFRSPYKVNVFRAVYRSGFVVLTTVISMLMPFFNDVVGILGALGFWPLTVYFPVEMYIRQRKVERWSMKWVCLQMLSCGCLMITLVAGVGSIAGVMLDLKVYKPFKTTY

SEQ ID NO: 760 - protein, 107 aa, Nicotiana glauca X Nicotiana langsdorffii
LERSGGASVGIVVSESGWPSAGAFGATYDNAATYLKNLIQHAKEGSPRKPGPIETYIFAMFDENNKNPELEKHFGLFSPNKQPKYNLNFGVSGSVETNATASLISEM

SEQ ID NO: 761 - protein, 484 aa, Fremontodendron californicum x Fremontodendron mexicanum
  unsure (1)..(484): unsure at all Xaa locations
SGISTLEKEXLGRISQIIGPVLDVAFPPGKMPNIYNALVVKGRDTAGQQINVTCEVQQLLGNNRVRAVAMSATDGLMRGMEVIDTGAPLSVPVGGATLGRIFNVLGEPVDNLGPVDTRTTSPIHKPAPAFIQLDTKLSIFETGIKVVDLLAPYRRGGKIGLFGGAGVGKTVLIMELINNIAKAHGGVSVFGGVGERTREGNDLYMEMKESGVINEQNLAESKVALVYGQMNEPPGARMRVGLTALTMAEYFRDVNEQDVLLFIDNIFRFVQAGSEVSALLGRMPSAVGYQPTLSTEMGTLQERITSTKEGSIISIQAVYVPADDLTDPAPATTFAHLDATTVLSRGLAAKGIYPAVDPLDSTSTMLQPRIVGEEHYETAQRVKQTLQRYKELQDIIAILGLDELSEEDRLTVARARKIERFLSQPFFVAEVFTGSPGKYVGLAETIRGFKLILSGELDGLPEQAFYLVGNIDEATAKATNLEME

SEQ ID NO: 762 - protein, 191 aa, Pseudomonas syringae
FLQVDTRNILFICGGAFSGLEKVIQNRSTRGGIGFNAEVRSKEEGKKVGESLREVEPDDLVKFGLIPEFVGRLPVLATLDELDEAALIQILTEPKNALTKQYAKLFEMEGVDLEFRTDALKSVARRALERKTGARGLRSILEGVLLDTMYEIPSQSDVSKVVIDESVIDGTSKPLLIYENNEPPAKVAPDA

SEQ ID NO: 763 - protein, 179 aa, Triticum aestivum
MAFAPKASSSAPSLSRPMRCGTVASVAVPVPLPGRPVVRAVAAAAVASLEPAVTVPAPALAGRSASLSAAGKRGLSVAEAMSRGRANGKTAFIPYITAGDPDLATTAEALKLLDSLGADVIELGLPFSDPSADGPVIQASAARALAAGATTDAVMSMLKEVTPELSCPVVIFSYFSPIL

SEQ ID NO: 764 - protein, 481 aa, Flagellaria indica
  unsure (1)..(481): unsure at all Xaa locations
SGVSTMEEKXXGSIIQIIGPVLDVNFPSGKLPNIYNALVVKGRDTVGHQINVTCEVQQLLGNNRVRAVAMSATDGLTRGMEVIDTGAPLSVPVGGATLGRIFNVLGEPVDNLGPVDTSATSPIHRSAPAFIELDTKLSIFETGIKVVDLLAPYRRGGKIGLFGGAGVGKTVLIMELINNIAKAHGGVSVFGGVGERTREGNDLYKEMKESGVINEKNIAESKVALVYGQMNEPPGARMRVGLTALTMAEYFRDVNKQNVLLFIDNIFRFVQAGSEVSALLGRMPSAVGYQPTLSTEMGSLQERITSTKKGSITSIQAVYVPADDLTDPAPATTFAHLDATTVLSRVLAAKGIYPAVDPLDSTSTMLQPRIVGDEHYEIAQRVKETLQRYKELQDIIAILGLDELSEEDRLTVARARKIERFLSQPFFVAEVFTGSAGKYVGLAETIRGFQLILSGELDGFPEQAFYLVGNIDEATAKAMNL

SEQ ID NO: 765 - protein, 490 aa, Iseia luxurians
MRINPTTSSSEVSAVEKKNLGRIVKIIGPVLDVAFPSGKMPYIYNALVVQGRDNEQTNVTCEVQQLLGNNRVRAVAMSDTDGLMRGMEVIDTGAPISVPVGGSTLGRIFNVLGEPVDNLGPVDTNTTSPIHRSAPAFIQLDTKLAIFETGIKVVDLLAPYRRGGKIGLFGGAGVGKTVLIMELINNIAKAHGGVSVFGGVGERTREGNDLYLEMKESGVINEENIAESKVALVYGQMNEPPGARMRVGLTALTMAEYFRDVNEQDVLLFIDNIFRFVQAGSEVSALLGRMPSAVGYQPTLSTEMGSLQERITSTKEGSITSIQAVYVPADDLTDPAPATTFAHLDATTVLSRGLAAKGIYPAVDPLDSTSTMLQPRIVGEEHYETAQRVKQTLQRYKELQDIIAILGLDELSEEDRLTVARARKIERFLSQPFFVAEVFTGSPGKYVGLAETIRGFQLILSGELDGLPEQAFYLVGNIDEATAKAMNLKT

SEQ ID NO: 766 - protein, 470 aa, Escallonia sp. 'Chase 2499 K'
  unsure (1)..(470): unsure at all Xaa locations
GRFAQIIGPVLDVAFPPGKMPNIYNALVVXGRDTGGQPINVTCEVQQLLGNNRVRAVAMSATDVLTRGMEVIDTGVLLSVPVGGATLGRIFNVLGEPVDNLGPVDTRTTSPIHRSAPAFIQLDTKLSIFETGIKVVDLLAPYRRGGKIGLFGGAGVGKTVLIMELINNIAKAHGGVSVFGGVGERTREGNDLYMEMKESGVINEQNIGESKVALVYGQMNEPPGARMRVGLTALTMAEYFRDVNEQDVLLFIDNIFRFVQAGSEVSALLGRMPSAVGYQPTLSTEMGSLQERITSTKEGSITSIQAVYVPADDLTDPAPATTFAHLDATTVLSRGLAAKGIYPAVDPLDSTSTMLQPRIVGEEHYEIAQRVKQTLQRYKELQDIIAILGLDELSEEDRLTVARARKIERFLSQPFFVAEVFTGSPGKYVGLAETIRGFQLILSGELDGLPEQAFYLVGNIDEATAKAMNL

SEQ ID NO: 767 - protein, 535 aa, Hordeum vulgare
MEVNVKGNYVQVYVMLPLDAVSVNNRFEKGDELRAQLRKLVEAGVDGVMVDVWWGLVEGKGPKAYDWSAYKQLFELVQKAGLKLQAIMSFHQCGGNVGDAVNIPIPQWVRDVGTRDPDIFYTDGHGTRNIEYLTLGVDNQPLFHGRSAVQMYADYMTSFRENMKDFLDAGVIVDIEVGLGPAGEMRYPSYPQSHGWSFPGIGEFICYDKYLQADFKAAAAAVGHPEWEFPNDVGQYNDTPERTQFFRDNGTYLSEKGRFFLAWYSNNLIKHGDRILDEANKVFLGYKVQLAIKISGIHWWYKVPSHAAELTAGYYNLHDRDGYRTIARMLKRHRASINFTCAEMRDLEQSSQAMSAPEELVQQVLSAGWREGLNVACENALPRYDPTAYNTILRNARPHGINQSGPPEHKLFGFTYLRLSNQLVEGQNYVNFKTFVDRMHANLPRDPYVDPMAPLPRSGPEISIEMILQAAQPKLQPFPFQEHTDLPVGPTGGMGGQAEGPTCGMGGQVKGPTGGMGGQAEDPTSGIGGELPATM

SEQ ID NO: 768 - protein, 503 aa, Pseudomonas fluorescens PfO-1
MTTPFEHSSLRWRLNLRSLCMSVRRTKIVATLGPASNSPEVLEQLILAGLDVARLNFSHGTPDEHKARAKLVRDLAAKHGRFVALLGDLQGPKIRIAKFANKRIELKIGDQFTFSTSHPLTEGNQQVVGIDYPDLVKDCGVGDELLLDDGRVVMRVETATATELNCVVTIGGPLSDHKGINRRGGGLTAPALTEKDKADIKLAAEMEVDYLAVSFPRDAADMNYARQLRDEAGGTAWLVAKIERAEAVADDETLDGLIKASDAVMVARGDLGVEIGDAELVGIQKKIILHARRHNKAVIVATQMMESMIQNPMPTRAEVSDVANAVLDYTDAVMLSAESAAGAYPLEAVQAMARICVGAEKHPTSKTSSHRIGKEFERCDESIALATMYTANHFPGVKAIIALTESGYTPLIMSRIRSSVPIYCFTPHREAQARAAMFRGVYTVPFDPASLAPNEVSQKAIDELVKRGVVEKGDWVILTKGDSYHTTGGTNGMKILHVGDPQV

SEQ ID NO: 769 - protein, 481 aa, Ralstonia solanacearum
MLPDPAQTGARAPASQPNPNVNLWQAHLHQTAQRARLARPVVTCGKLTRVAGLVMEAVGLKLPVGSACRVELPYGRHVLAEVVGFAEERAFLMPQTDLVGVVPGARVFPLEPQHLPLDTADPTIAHSKFLPVGPRLLGRVVDANGEPLDGKGPLGASEELAWGSLAPAPLNPLKRKPIERVLDVGVRAINGLLTVGQGQRLGLFAGSGVGKSVLLGMMARYTQADVVVVGLIGERGREVKEFIDEILGDEGLARSAVVAAPADNSPLMRLQGAAYAHTIAEYFRDRGCNVLLIVDSLTRYAMAQREIALAIGEPPATKGYPPSAFAKLPALVERAGNGMVDAAGRGGSITAFYTVLAEGDDQQDPIADAARAILDGHFVLSRKLAEQGHYPAIDIEQSISRVMSAIVPREQLDAARRFKQLYARYQRNRDLIAVGAYARGSDPVTDQAIARYPSMEGFLQQGMFENESRERTLEKMNAVLS

SEQ ID NO: 770 - protein, 248 aa, Archaeoglobus fulgidus DSM 4304
MIDRSLIVFFTACYPTAEKTVEFMLTAAESGADVIELGVPFSDPVADGKTIQESYVRALRNFRVERVFEIAKAFRAESDKPLVLMSYYNPIYRRGVESFVEKAYSSGIDAMLVVDLPYDEAGDFVEVCSRTGMKNVFLAAPNTPEDRLRAMDELSAFVYLVSTYGVTGERDRISPLAFEALKRAKGICRKPVAVGFGVSKADHVRQLISAGADGVVVGSAFVRLINEKGERATEDIRALTENLRSGLV

SEQ ID NO: 771 - protein, 317 aa, Ralstonia eutropha
MSAPETTAPLQPPAAPAASLPGSLAESLASSGITELLAQLDRELIGLKPVKARIRDIAALLLVDKLRAARGFSAGAPSLHMCFTGNPGTGKTTVAMRMAQILHQLGYVRRGHLVAVTRDDLVGQYIGHTAPKTKEILKKAMGGVLFIDEAYYLYRPENERDYGQEAIEILLQVMENNRDDLVVILAGYKDRMDRFFESNPGMSSRVAHHVDFPDYQLDELRQIADLMLSEMQYRFDDESRAVFADYLARRMTQPHFANARSVRNALDRARLRHASRLLDDAGTVVDDHTLTTITASDLLASRVFSKAAPDARTPAKE

SEQ ID NO: 772 - protein, 364 aa, Pennisetum glaucum
DNYMEEAFKMRNLLEEFLITHGKSKPTILGAREHIFTGSVSSLAWFMSNQETSFVTIGQRVLANQLKVRFHYGHPDVFDRLFHLTRGGISKASKVMNLSEDIFAGFNSTLRQGNVTHHEYIQLGKGRDVGMNQISNFEAKVANGNGEQTLCRDIYRLGHRFDFFRMLSMYFTTVGFYFNSMVAVLTVYVFLYGRLYLVLSGLEKSILQDPNIQNIKPFENALATQSVFQLGMLLVLPMMMEVGLEKGFGRALAEFVIMQLQLAPVFFTFHLGTKTHYYGRTILHGGAKYRGTGRGFVVRHAKYAENYRMYSRSHFVKALELFILLVVYLAYGSSYRSSSLYLYVTVSIWFLVFCWLFAPFLFNP

SEQ ID NO: 773 - protein, 359 aa, Capsicum annuum
MGTAIILLGLLAANIDIAGGQSIGVCYGMLGNNLPPASQVVQLYKSRNIRRMRLYDPNQAALQALRGSNIEVMLGVPNSIFKTLLPPFNAILGSKECQNSGHCLNYRVHCCEMKSALLTGTSSLTRFLLPAMRNIRNAISSAGLGNNIKVSTSIDMTLIGNSFPPSQGSFRNDVRSFIDPIIVFLRGINSPLLVNIYPYFSYAGNPRDISLSYALFTAPNVVVQDGSLGYRNLSDERLDSVTAALSQARGGSVEIVVSESGWPSAGAFATTTNDAAAYYKNLIQHVKRGSPRRPNKVIETYLFAMFDENNKNPELEKHFGGFSPNKQPKFPLNFGFSDRFLDIFAENNNATSTFFKSDI

SEQ ID NO: 774 - protein, 442 aa, Verbena scabrido-glandulosa
IYNALVVKGRDTVGQPMNVACEEQQLLGNNRVRAVAMSATDVLTRGMEVIDTGAPLSVPVGGATLGRIFNVLGEPVDNLGPVDTRTTFPIHRSAPAFIQLDTKLSIFETGIKVVDLLAPYRRGGKIGLFGGAGVGKTVLIMELINNIAKAHGGVSVFGGVGERTREGNDLYMEMKESGVINEENIAESKVALVYGQMNEPPGARMRVGLTALTMAEYFRDVNEQDVLLFIDNIFRFVQAGSEVSALLGRMPSAVGYQPTLSTEMGSLQERITSTKKGSITSIQAVYVPADDLTDPAPATTFAHLDATTVLSRGLAAKGIYPAVDPLDSTSTMLQPRIVGEEHYETAQRVKQTLQRYKELQDIIAILGLDELSEEDRLTVARARKIERFLSQPFFVAEVFTGSPGKYVGLAETIRGFQLILSGELDGLPEQAFYLVGNIDEAT

SEQ ID NO: 775 - protein, 550 aa, Streptococcus pyogenes SSI-1
MRRDQASIQVYEETSGIGPGEPVVTTGCPLSVELGPGLISEMFDGIQRPLDRFQKATDSDFLIRGVAIPSLDRKAKWAFIPKLSVGQEVVAGDILGTVQETAVIEHRIMVPYKVSGTLVAIHAGDFTVTDTVYEIKQEDGSIYQGSLMQTWPVRQSRPVAQKLIPVEPLVTGQRVIDTFFPVTKGGAAAVPGPFGAGKTVVQHQIAKFANVDIVIYVGCGERGNEMTDVLNEFPELIDPNTGQSIMERTVLIANTSNMPVAAREASIYTGITIAEYFRDMGYSVAIMADSTSRWAEALREMSGRLQEMPGDEGYPAYLGSRIAEYYERAGRVRTLGSQEREGTITAIGAVSPPGGDISEPVTQNTLRIIKVFWGLDAPLAQRRHFPAINWLTSYSLYQDDVGSYIDRKQESNWSNKVTRAMAILQREASLEEIVRLVGLDSLSEQDRLTMAVARQIREDYLQQNAFDSVDTFTSFPKQEAMLTNILTFNEEASKALSLGAYFNEIMEGTAQVRDRIARSKFIPEENLEQIKGLTQKVTKEIHHVLAKGGI

SEQ ID NO: 776 - protein, 485 aa, Phytolacca dioica
  unsure (1)..(485): unsure at all Xaa locations
INPXNFXSGVSTXEKRNLGRIVQXXGPVLDVXFPPGKMPNIYNALVVKGRDTAGQPINVXCEVQQLLGNNRVRAVAMSATDGLTRGMEVSDTGAPLSVPVGGATLGRIFNVLGEPVDNLGPVDTRTTSPIHRSAPAFTQLDTKLSIFETGIKVVDLLAPYRRGGKIGLFGGAGVGKTVLIMELINNIAKAHGGVSVFGGVGERTREGNDLYMEMKESGVINEQNIAESKVALVYGQMNEPPGARMRVGLTALTMAEYFRDVNEQDVLLFIDNIFRFVQAGSEVSALLGRMPSAVGYQPTLSTEMGSLQERITSTKEGSITSIQAVYVPADDLTDPAPATTFAHLDATTVLSRGLAAKGIYPAVDPLDSTSTMLQPRIVGEEHYETAQRVKQTLQRYKELQDIIAILGLDELSEEDRLTVARARKIERFLSQPFFVAEVFTGSPGKYVGLVETIRGFQLILSGEFDGLPEQAFYLVGNIDEATAKA

SEQ ID NO: 777 - protein, 223 aa, Gossypium hirsutum
MGRGKIEIKRIENTTNRQVTFCKRRNGLLKKAYELSVLCDAEVALIVFSSRGRLYEYSNNNIRSTIDRYKKACSDTSNTNTVTEINAQYYQQESAKLRQQIQMLQNSNRHLMGDSLSSLTVKELKQVENRLERGITRIRSKKHEMLLAEIEFLQKREIELENESVCLRTKIAEIERLQQANMVTGPELNAIQALASRNFFSPNVIEHPSAYSHPSDKKILHLG

SEQ ID NO: 778 - protein, 252 aa, Glycine max
MKPVFCGNLDFDARQSDVERLFRRYGKVDRVDMKSGFAFVYMEDERDAEYAIRRLDRTEFGRKGRRIRVEWTKQERDSRRSGGDSRKSSSNSRPSKTLFVINFDPVNARTRDLERHFDSYGKILNIRIRRNFAFIQFESQEDATRALEATNLSKFMDRVITVEYAIRDDDDRDRRNGYSPDRRGHDSPDGRYGRGRSPSPYRRGRGSPDYGHGSNPSSRPEPRGSPKYDRAESPINGRYDSRSPPPRDRSRS

SEQ ID NO: 779 - protein, 590 aa, Saccharomyces pastorianus
RISLEDHAESEYGSIYSVSGPVVIAENMIGCAMYELVKVGHDNLVGEVIRIDGDKATIQVYEETAGLTVGDPVLRTGKPLSVELGPGLMETIYDGIQRPLKAIKEESQSIYIPRGIDTPSLDRTIKWQFTPGKFQVGDHISGGDIYGSVFENSLISSHKILLPPRSRGTITWIAPAGEYTLDEKILEVEFDGKKSDFTLYHTWPVRVPRPVTEKLSADYPLLTGQRVLDALFPCVQGGTTCIPGAFGCGKTVISQSLSKYSNSDAIIYVGCGERGNEMAEVLMEFPELYTEMSGTKEPIMKRTTLVANTSNMPVAAREASIYTGITLAEYFRDQGKNVSMIADSSSRWAEALREISGRLGEMPADQGFPAYLGAKLASFYERAGKAVALGSPDRIGSVSIVAAVSPAGGDFSDPVTTATLGITQVFWGLDKKLAQRKHFPSINTSVSYSKYTTVLNKFYDSDYPEFPVLRDRMKEILSNAEELEQVVQLVGKSALSDSDKITLDVAALVKEDFLQQNGYSTYDAFCPIWKTYDMMRAFIAYHDEAQKAVANGANWSKLADSTSDGKHSVSSSKFFEPSRGEKEVHGDFEK

SEQ ID NO: 780 - protein, 488 aa, Jacquemontia blanchetii
  unsure (1)..(488): unsure at all Xaa locations
MNPTTSSSEVSAVEKKNLGRIVQIIGPVLDVAFPPGKMPNIYNALVVQGRDNEQTNVTCEVQQLLGNNRVRTVAMSDTDGLMRGMDVIDMGAPISVPVGGSTLGRIFNVLGEPVDNLGPVDTXTTSPIHRSAPAFTQLDTKLSIFVTGIKVVDLLAPYPRGGKIGLFGGAGVGKTVLIMELINNIAQAHGGVSVFGGVGERTREGNDLYMEMKESGVINEEKIAESKVALVYGQMNEPPGARMRVGLTALTMAEYFRDVNEQDVLLFIDNIFRFVQAGSEVSALLGRMPSAVGYQPTLSTEMGTLQERITSTKEGSITSIQAVYVPADDLTDPAPATTFAHLDATTVLSRGLAAKGIYPAVDPLDSTSTMLQPRIVGKEHYETAQRVKQTLQRYKELQDIIAILGLDELSEEDRLTVARARKIERFLSQPFFVAEVFTGSPGKYVGLVETIRGFQLILSGEFDSLPEQAFYLVGNIDEATAKAMNLKT

SEQ ID NO: 781 - protein, 450 aa, Rickettsia sibirica
MKATKTTYKKDPMGLTPSQIVNELNRFIVGQEKAKKAVAIALRNRCRRKRVEGNLRNEIVPKNILMIGSTGVGKTEIARRLAKLTNSPFYKIEATKFTEVGYVGRDVESIIRDLVEIAVNTEKTLAKTKVDIHAREKAIERILDSLVGKTSSSETREKFKEKILNGELDDKEIEISVADTTPVGGGSFEIPGMPGASMGVLNLGDMIGRALGSSKTKTKKMLVKDAMAIIIPEESEKLIDQEKIIQQAINLAENDGIVFIDEIDKIASTGSSGAKNAEISREGVQRDLLPLIEGTTVNTKYGPVKTDHILFIASGAFHIAKPSDLLPELQGRLPIRVELNSLTKDDMIKILLEPETSLIKQYSALIGTEDVRLEFAASAIEKIADYAITVNLEVEDIGARRLHTILENLLEDISFEASEMKGKKITIDDKFVENQLSKIITNLDLAKFVL

SEQ ID NO: 782 - protein, 159 aa, Rhodospirillum rubrum
SSIGFGADVRDPEARRTGEVLRAVEPEDLLKYGLIPEFVGRLPVLATLDDLDEDALVDILTTPKNALVKQYQRLFEMESTQLSFKEDALRCIALKAIARKTGARGLRSIMEGILLDTMFDLPGMEGVEEVVVNKEVVEGRAKPLFIYSDQRTSADGASA

SEQ ID NO: 783 - protein, 466 aa, Actinobacillus pleuropneumoniae serovar 1 str. 4074
MGPATDRGNNLEKVIAAGANMVRMNFSHGVPEDHIERANKVREIAARLGKTVAILGDLQGPKIRVSTFKDGKIFLNIGDKFTLDADLPRGEGHQDAVGLDYKNLPNDVVPGDILLLDDGNVQLKVLSVEGVKVHTEVTVGGPLSNNKGINKLGGGLSAPALTEKDKEDIKLAAKIGVDYLAVSFPQSSADLDYARQLAREAGLEAKIVAKVERAETVATEEAMDDIILGSDVVMVARGDLGVEIGDAALVGVQKRLIRRARKLNRVVITATQMMESMIKKPMPTRAEVMDVANAVLDGTDAVMLSGETANGDYPVETVKSMAEVCLGAETMPSINISRHRMEGTFATIDEAVAMSAMYTANHLEGVSALIALTHSGETAKLMSRISSGLPIYALSRNQQALNRTALYRGVTPVFYDEESRTFEGAKKAIALLKEKGYLMSGDLVLLTQGDELKEGGTNTSRLLKVE

SEQ ID NO: 784 - protein, 106 aa, Malus x domestica
YALFTAPSVVVQDGQRGYRNLFDAILDAVYAALDKVGGGSLEIVVSESGWPTAGGTATTVDNARTYNSNLIQHVKGGTPRKPGRPIETYIFAMSDENRKTPELEKH

SEQ ID NO: 785 - protein, 219 aa, Lactococcus lactis subsp. lactis bv. diacetylactis
PGTGKTTVARIVGHMYKAIGLLSKGHFIEASRTDLIAEYQGQTAIKVKRLINRAKGGVLFIDEAYSITENNHADSYGKESLTELTKALEDYRDDLVVIVAGYTDLMEQFFESNPGLKSRFNSFVFFEDYSIDELVEIFKNICEESDYSVDEAMIEKVRLWLQNKLDAKNGNFANGRVVRNLFDDITMNQAKRLVRDAHEELDKNLLEKLLPEDVPELKG

SEQ ID NO: 786 - protein, 498 aa, Euthystachys abbreviata
  unsure (1)..(498): unsure at all Xaa locations
XXXXXXXXXSGVSTLEKKNLGRIVQIIGPVLDVAFPRGKMPKIYNALVVKGRDTVGQPINVTCEVQQLLGNNRVRAVAMSATDGLMRGMEVIDTGAPLSVPVGGATLGRIFNVLGEPVDNLGPVDTRTTFPIHRSAPAFIQLDTKLSIFETGIKVVDLLAPYRRGGKIGLFGGAGVGKTVLIMELINNIAKAHGGVSVFGGVGERTREGNDLYMEMKESGVINEENIAESKVALVYGQMNEPPGARMRVGLTALTMAEYFRDVNEQDVLLFIDNIFRFVQAGSEVSALLGRMPSAVGYQPTLSTEMGSLQERITSTKEGSITSIQAVYVPADDLTDPAPATTFAHLDATTVLSRGLAAKGIYPAVDPLDSTSTMLQPRIVGEEHYETAQRVKQTLQRYKELQDIIAILGLDELSEEDRLTVARARKIERFLSQPFFVAEVFTGSPGKYVGLAETIRGFQLILSGELDGLPEQAFYLVGNIDEAAAKAMNLEMESNLKK

SEQ ID NO: 787 - protein, 490 aa, Austromuellera trinervia
GPGVSALEEKNLGRIAQIIGPVLDVAFPPGKMPNIYNALVVKGRDTVGQQINVTCEVQQLLGNNRVRAVAMSATDGLMRGMEVIDTGAPLSVPVGGATLGRIFNVLGEPVDNLGPVDTRTTSPIHRSAPAFIQLDTKLSIFETGIKVVDLLAPYRRGGKIGLFGGAGVGKTVLIMELINNIAKAHGGVSVFGGVGERTREGNDLYMEMKESGVINEQNIAESKVALVYGQMNEPPGARMRVGLTALTMAEYFRDVNEQDVLLFIDNIFRFVQAGSEVSALLGRMPSAVGYQPTLSTEMGSLQERITSTKEGSITSIQAVYVPADDLTDPAPATTFAHLDATTVLSRGLAAKGIYPAVDPLDSTSTMLQPRIVGEEHYETAQRVKQTLQRYKELQDIIAILGLDELSEEDRLTVARARKIERFLSQPFFVAEVFTGSPGKYVGLAETIRGFQLILSGELDGLPEQAFYLVGNIDEATAKAMNLEVESNLKK

SEQ ID NO: 788 - protein, 592 aa, Sulfolobus acidocaldarius
MVSEGRVVRVNGPLVIADGMREAQMFEVVYVSDLKLVGEITRIEGDRAFIQVYESTDGVKPGDKVYRSGAPLSVELGPGLIGKIYDGLQRPLDSIAKVSNSPFVARGVSIPALDRQTKWHFVPKVKSGDKVGPGDIIGVVQETDLIEHRILIPPNVHGTLKELAREGDYTVEDVVAVVDMNGDEIPVKMYQKWPVRIPRPYKEKLEPVEPLLTGIRVLDTVFPIAKGGTAAIPGPFGSGKTVTLQSLAKWSAAKVVIYVGCGERGNEMTDELRSFPKLKDPWTGKPLLLRTILVANTSNMPVAARESSIYVGVTMAEYFRDQGYDVLLVADSTSRWAEALRDLGGRMEEMPAEEGFPSYLPSRLAEYYERAGRVIALGNPERYGSVTIASAVSPPGGDFTEPVTSNTLRFVRVFWPLDVSLAQARHYPAINWIQGFSAYVDLVAQWWHKNVDPNWKEMRDTMMKVLIREDELRQIVRLVGPEELAEKDKLVLEAAKLIKDAFLKENAYDDIDAFSSPQKQVRIMRLIYIFYNQSQDLISKGVPLKKILDKVGPIEPEIIRIKYTIKNDELNKIDEIENKLKATFDSLLKEVS

SEQ ID NO: 789 - protein, 162 aa, Castanea sativa
TKSRFLLAIDTGVLSSDSFPPSKGSFRADYRPILDPVIRFLVNNGSPLLVNLYPYFSYTGNTKDIRLDYALFTAPSPVVNDPPLSYRNLFDAILDTVYSALEKAGGGSLVIVISESGWPSAGGTATTLDNERTYITNLVQHVKGGTPKKPGRPIETYIFALF

SEQ ID NO: 790 - protein, 420 aa, Bacillus subtilis subsp. subtilis str. 168
MFKFNEEKGQLKCSFCGKTQDQVRKLVAGPGVYICDECIELCTEIVEEELGTEEEVEFKDVPKPQEIREILNEYVIGQDQAKKSLAVAVYNHYKRINSNSKVDDVELSQSNISLIGPTGSGKTLLAQTLARILNVPFAIADATSLTEAGYVGEDVENILLELIQAADYDVEKTGKGIIYIDEIDKVARKSENPSITRDVSGEGVQQALLKILEGTVASVPPQGGRKHPHQEFIQIDTTNILFICGGRFDGIEQIIKRRLAQKVIGFGADNKAADLEKEDLLSKVLPEDLLRFGLIPEFIGRLPVIASLEKLDEEALVAILTKPKNALVKQFKKMLELDNVELEFEEEALSEIAKKAIERKTGARGLRSIIEGIMLDVMFELPSRDDIEKCVITGATVTHGEPPRLLLKDGTEVSQDKTSA

SEQ ID NO: 791 - protein, 762 aa, Lotus japonicus
MWKLKVADGGKNPYIFSINNFVGRQTWEYDPDAGTPEERAQVEEARQDFYNNRYKVKTCGDRLWRFQVMRENNFKQTIPSVKIEDGEKVTYDKVTTTVRRAAHHLAGLQTSDGHWPAQIAGPLLFTPPLIFCMYITGHLDSVFPEVYRKEILRYTYVHQNEDGGWGLHIEGHSTMFCTVLNYICMRILGEGPDGGQDNACARARKWIHDHGGATHIASWGKTWLSILGIFDWSGTNPMPPEFWILPSFLPMHPAKMWCYCRLVYMPMSYLYGKRFVGPITPLILQLREELFTQPYEKVNWKKARHQCAKEDLYYPHPLIQDLMWDSLYLFTEPFLTRWPFNKLIRERALQVTMKHIHYEDHNSRYITIGCVEKVLCMLACWVEDPNGIAFKRHLARVPDYLWLAEDGMCMQSFGSQEWDAGFAVQALLSTNLIDELGPALAKGHDFIKNSQVKDNPSGDFKSMHRHISKGAWTFSDQDHGWQVSDCTAEGFKCCLLLSMLPPEIVGEKIEPERLFDTVNLLLSLQSKKGGFAVWEPAGAQEWLELLNPIEFFEDIVIEHELVECTGSAIGALVLFKNHYPEHRKKEIEDCIANAVRYFEDIQTADGSWYGNAGICFIYGTWFALGGLEAAGKTYANCAAIRKGVKFLLTTQSKDGGWGESYLSCPKKIYVPLEGNRSNVVQTAWALMGLIHAGQAERDPTPLHRAAKLLINSQLEDGDWPQQDITGVYVKNCTLHYPMYRNNFTTMALAEYRRRVPLPSIAV

SEQ ID NO: 792 - protein, 592 aa, Clostridium tetani E88
MDLKTGRVVKVSGPLVVAEGMEEANLFDVVRVGDERLIGEIIEMREDKASIQVYEETSGLGPGAPVVTTGAPLSVELGPGLIEAMFDGIQRPLDAIEAKAGDFITRGIDVPSLSREKVWHFNPTKKAGDKVETGDILGLVQETSVIEHRIMVPPGIKGEIISLNEGDYTVIDKIGEIKTDKGIEDLTLMQKWPVRRGRPYKRKLNPSAPMVTGQRVVDTFFPVTKGGTACVPGPFGSGKTVVQHQLAKWADAQIVVYIGCGERGNEMTDVLNEFPELKDPKTGESLMKRTVLIANTSNMPVAAREASIYTGITIGEYFRDMGYSIALMADSTSRWAEALREMSGRLEEMPGEEGYPAYLGSRLAEFYERAGNVICLGQDGREGALTAIGAVSPPGGDLSEPVTQATLRIVKVFWGLDSQLAYRRHFPAINWLNSYSLYLDKVGPWMNENVAEDWVELRQKAMALLQEEANLQEIARLVGIDALSEEDRLKLEVAKSLREDYLQQNAFHDVDTYAPLNKQYRMLKAVLQFGDEARKALESGVYLKDILNLPVRDKIARAKYIDEKDILSIDEISKELTKDIEDLISKGGILDA

SEQ ID NO: 793 - protein, 490 aa, Gerbera jamesonii
  unsure (1)..(490): unsure at all Xaa locations
XXXXXXXSGSGVSTLEKKNLGRIAQIIGPVLDVAFPPGKMPNIYNALVVKGRDTVGQPINVTCEVQQLLGNNRVRAVAMSATDGLTRGMDVIDTGAPLSVPVGGATLGRIFNVLGEPVDNLGPVDTSTTFPIHRSAPAFIQLDTKLSIFETGIKVVDLLAPYRRGGKIGLFGGAGVGKTVLIMELINNIAKAHGGVSVFGGVGERTREGNDLYMEMKESGVINEQNIAESKVALVYGQMNEPPGARMRVGLTALTMAEYFRDVNEQDVLLFIDNIFRFVQAGSEVSALLGRMPSAVGYQPTLSTEMGSLQERITSTKEGSITSIQAVYVPADDLTDPAPATTFAHLDATTVLSRGLAAKGIYPAVDPLDSTSTMLQPRIVGEEHYEIAQQVKQTLQRYKELQDIIAILGLDELSEEDRLTVARARKIERFLSQPFFVAEVFTGSPGKYVGLAETIRGFQLILSGELDGLPEQAFYLVGNIDEATAKAMNL

SEQ ID NO: 794 - protein, 493 aa, Anemarrhena asphodeloides
MRINPTTSSPAVSALEEKNLGRIAQIIGPVLDVVFPPGKLPNIYNALVVQGRDIVGQQINVTCEVQQLLGNNRVRAVAMSATDGLTRGMEVVDTGAPLSVPVGGATLGRIFNVLGEPVDNLGPVDTRTTSPIHRSAPAFIQLDTKLSIFETGIKVVDLLAPYRRGGKIGLFGGAGVGKTVLIMELINNIAKAHGGVSVFGGVGERTREGNDLYMEMKESGVINEKNIAESKVALVYGQMNEPPGARMRVGLTALTMAEYFRDVNEQDVLLFIDNIFRFVQAGSEVSALLGRMPSAVGYQPTLSTEMGSLQERITSTKEGSITSIQAVYVPADDLTDPAPATTFAHLDATTVLSRGLAAKGIYPAVDPLDSTSTMLQPRIVGEEHYETAQRVKETLQRYKELQDIIAILGLDELSEEDRLTVARARKIERFLSQPFFVAEVFTGSPGKYVGLAETIRGFQLILSGELDGLPEQAFYLVGNIDEATAKAMNLERG

SEQ ID NO: 795 - protein, 1053 aa, Sorghum bicolor
MVAARRGTASTYALLLLLLLTAAVSVSSSSGLRRGEDQDRSALLQIKNAFPAVELLQQWSPDSGGPNHCSWPGVTCDSSSRVVALEVLSPSRRSGHGRELAGELPAAVGLLAELKEVSFPLHGLRGEIPGEIWRLEKLEVVNLPGNSLRGVLPSAFPPRLRVLSLASNLLHGEIPSSLSTCEDLERLDLSGNRFTGSVPRALGGLTKLKWLDLSGNLLAGGIPSSLGNCRQLRSLRLFSNSLHGSIPAGIGSLKKLRVLDVSRNRLSGLVPPELGNCSDLSVLILSSQSNSVKSHEFNLFKGGIPESVTALPKLRVLWVPRAGLEGTLPSNWGSADRFGNKMTYMFVVDHNKFSGSLDSILLEQCSNFKGLVVSFRDNKISGQLTAELSRKCSAIRALDLAGNQISGMMPDNVGLLGALVKMDMSRNFLEGQIPASFEDLKTLKFLSLAGNNLSGRIPSCLGQLRSLRVLDLSSNSLAGEIPNNLVTLRDITVLLLNNNKLSGNIPDLASSPSLSIFNVSFNDLSGPLPSKVHSLTCDSIRGNPSLQPCGLSTLSSPLVNARALSEGDNNSPPDNTAPDGNGSGGGFSKIEIASITSASAIVAVLLALVILYIYTRKCASRPSRRSLRRREVTVFVDIGAPLTYETVLRASGSFNASNCIGSGGFGATYKAEVAPGKLVAIKRLAIGRFQGIQQFQAEVKTLGRCRHPNLVTLIGYHLSDSEMFLIYNFLPGGNLERFIQERSKRPIDWRMLHKIALDVARALAYLHDNCVPRILHRDVKPSNILLDNDHTAYLSDFGLARLLGNSETHATTGVAGTFGYVAPEYAMTCRVSDKADVYSYGVVLLELISDKKALDPSFSPYGNGFNIVAWACMLLQKGRSREFFIEGLWDVAPHDDLVEILHLGIKCTVESLSSRPTMKQVGLLAVLVTATAGNVPNKLVAITHQLFKYHFSTGPQAGHSWYLTLIGYVIMHYCMDHDIASMPLQASIEDDDWMSHGRPSICLAVQLFRHNLPCCSPDRRSTTLSHWNNIYLSKQSQYIWQLWGDLSLEMACH

SEQ ID NO: 796 - protein, 486 aa, Vicia faba var. minor
MVENISRTNLSYRGDTGGIEEAIDDAPLQTDSKFYDDDGRVKRTGTVWTTCSHIITGVIGSGVLSLAWSVAQMGWIAGPATMIFFSIITLYTSSFLADCYRSGDTEFGKRNYTFMDAVHNILGGPSVKICGVVQYLNLFGSAIGYNIAAAMSMMEIRKSYCVHSSHGEDPCHVSGNAYMIAFGVAQLFFSQIPDFHNTWWLSIVAAVMSFFYSTIALALGISKVAETGTVMGSLTGISIGTVTPAQKVWGVFQALGNIAFAYSYSFILLEIQDTIKSPPSEGKAMKKAAKLSIGVTTTFYLLCGCTGYAAFGDAAPGNLLAGFGVSKAYILVDMANAAIVVHLFGAYQVYAQPLFAFVEKEAGKKWPKIDKGFEVKIPGLPVYNQNIFMLVWRTIFVIVPTLIAMLIPFFNDVLGVIGALGFWPLTVYFPVEMYIIQKKIPKWSRKWICLEIMSTFCLFVSVVAGLGSLIGVWIDLKKYKPFSLEN

SEQ ID NO: 797 - protein, 148 aa, Triticum aestivum
SNSLVPNSARGDGNSASAAGVPNEKAKFARTSKGSSAAGLKRGRRAVSESSDSETTTDSEEEITVDGAAANNAKPSQHSRRSSRQKQEVKYKEDSEDEDIGDDGNDDDDNNVSSSNFKRLRKGGVLHGDDQSSTPKFDEDKTGHNGHT

SEQ ID NO: 798 - protein, 485 aa, Zingiber gramineum
  unsure (1)..(485): unsure at all Xaa locations
MRTNPTTSSPVVSTLEEKKLGRIAQIIGPVLDVVFPPGKMPNIYNALVVKGRDTVGQQINVTCEVQQLLGNNRVRAVAMSATDGLTRGMEVIDTGAPLSIPVGGATLGRIFNVLGEPVDNLGPVDTSTTSPIHRPAPAFIELDTKFLIFETGIKVVDLLAPYRRGGKIGLFGGAGVGKTVLIMELINNIAKAHGGVSVFGGVGERTREGNDLYIEMKESGVINEKNIAESKVALVYGQMNEPPGARMRVGLTALTMAEYFRDVNEQNVLLFIDNIFRFVQAGSEVSALLGRMPSAVGYQPTLSTEMGSLQERITSTKKGSITSIQAVYVPADDLTDPAPATTFAHLDATTVLSRGLAAKGIYPAVDPLDSTSTMLQPRIVGEEHYETAQRVKQTSQRYKELQDIIAILGLDELSEEDRLTVARARKMERFLSQPFFVAEVFTGSPGKYVGLAXTIRGFQLILSETVFPSKPFIWWVTSMKLPRKL

SEQ ID NO: 799 - protein, 537 aa, Triticum aestivum
MEASVQQGNYVQVYVMLPLDAVSVNNRFEKGDELRPQLKRLVDAGVDGVMVDVWWGLVEAKGPRVYDWSAYKQLFKLVHEAGLKLQAIMSLHQCGGNVGDVVNIPIPQWVRDVGASDPDIFYTDQHGTRNIEYLTLGVDDQPLFHGRSAVQMYADYMASFRDNMKEFLDAGVIVDIEVGLGPAGELRYPSYPQSHGWSFPGIGEFICYDKYLQADFKAAAAMVGHPEWEFPHDSGTYNDTPERTRFFVDNGTYLTEQGRFFLAWYSNNLIKHGDKILDEANKVFLGHRVQLAIKISGIHWWYKAPSHAAELTAGYYNLHDRDGYRPIARMLKRHHASLNFTCAEMRDSEQSSQARSAPEELVQQVLSAGWREGLNVACENALPRYDPTAYNTILRNARPHGINKSGPPEHKLFGFTYLRLSNQLVEGQNYVNFKTFVDRMHANLPHDPCVDPVAPLQRSGPELTIEMILQAAQPKLEPFPFEEHTDLPVQGLGGIGGGEVEGPTGGMGGEVQDPTGGMGGEVQDPTGGMGGELPATM

SEQ ID NO: 800 - protein, 589 aa, Fusobacterium nucleatum subsp. vincentii ATCC 49256
MKEGRIIKVSGPLVVAEGMEEANVYDVVEVSDNKLIGEIIEMRGDKASIQVYEETTGIGPGDVVVTTGSPLSIELGPGMLEQMFDGIQRPLLKIQEAVGDFLLKGVSVPALDREKKWQFTPTMQVGEEVEPGKVIGTVQETEIVLHKIMVPNGVYGKIVDIKEGEFTVERTICSIETENGVRELNMIQKWPVRKGRPYLRKLNPVKPLITGQRIIDTFFAVTKGGTAAIPGPFGSGKTVIQHQLAKWADAEVVVYVGCGERGNEMTDVLMEFPEIIDPKTGQSLMKRTVLIANTSNMPVAAREASIYTGITIAEYFRDMGYSVALMADSTSRWAEALREMSGRLEEMPGDEGYPAYLSSRIAEFYERAGLVECLGNGEEGALTVIGAVSPPGGDISEPVSQSTLRIAKVFWGLDYALSYRRHFPAINWLNSYSLYQAKMDKYKEEEVDKDFPKFRIEAMALLQEEAKLQEIVRLVGRDSLSEFDQLKLEITKSLREDFLQQNAFHEVDTYCSLPKQFKMLKLILSFYDEAQRGIKEGVYLDEILALPAREKITRAKNISEKELDSFDKIEEEIKEAVSKLIAEGGKPNA

SEQ ID NO: 801 - protein, 496 aa, Medicago sativa
MATSNKNMLLNYVPVYVMLPLGVINVNNVFEDPDGLKEQLVQLRAAGVDGVMIDVWWGIIEQKGPKEYDWSAYKSLFQLVQKCGLKLQAIMSFHQCGGNVGDVVNIPLPKWVLDIGESDPDIFYTNRSGIRNQEYLSIGVDNKPIFHGRTAIEIYSDYMKSFRENMSDLLKSEVIIDIEVGLGPAGELRYPSYPQNQGWQFPGIGEFQCYDKYLRESFKAAAAKAGHSEWELPDDAGTYNDVPESTEFFKTNGTYLTEKGKFFLTWYSNQLLNHGDQILDEANKAFLGCKVKLAIKVSGIHWWYKAPNHAAELTAGYYNLDDRDGYRPIAKIVSRHHAILNFTCLEMRDSEQSSDAHSSPQKLVQQVLSGGWRENIEVAGENALSRYDATAYNQIILNARPQGVNKDGPPKLRMYGVTYLRLSDDLMQQSNFDIFKKFVVKMHADQDYCSDPEKYNHGIPPLKRSGPKIPDDVLNEATKPIPPFPWDSETDMKVDG

SEQ ID NO: 802 - protein, 498 aa, Arabidopsis thaliana
MATNYNEKLLLNYVPVYVMLPLGVVNVENVFADPETLETQLKRLKEEAGVDGVMVDVWWGIIESKGPKQYDWTAYKTLFQLIARLGLKIQAIMSFHQCGGNVGDIVTIPIPQWVRDVGDNDPDIYYTNRKGTRDIEYLSIGVDNLPLFAGRTAVQLYSDYMSSFKENMADLIEAGVIVDIEVGLGPAGELRYPSYPQSQGWVFPGIGEFQCYDKYLKKDFKEAAAKAGHPEWDLPEDAGEYNDKPEETGFFKKDGTYVSEKGKFFMTWYSNKLIFHGDQILGEANKIFAGLKVNLAAKVSGIHWLYNHHSHAAELTAGYYNLFKRDGYRPIARMLSKHYGILNFTCLEMKDTDNTAEALSAPQELVQEVLSKAWKEGIEVAGENALETYGAKGYNQILLNARPNGVNPNGKPKLRMYGFTYLRLSDTVFQENNFELFKKLVRKMHADQDYCGDAAKYGHEIVPLKTSNSQLTLEDIADAAQPSGAFKWDSETDLKVDG

SEQ ID NO: 803 - protein, 188 aa, Triticum aestivum
MAAPKPIARLISHVILDLDGTLLNTDCVVSQVLKPFLVKNGKKWDSKKAHKLVGKTPYEAAAVVLEDYGLPYSTEEFLSMLTPMFNEQWCNIKALPGANRLIKHLKSNGVPAALASNSPRSNIDAKISCHQGWKESFSAIVGGDEVEKGKPSPDIFLEAAKRMNTNPPNCLVIEDSLPRVAAGKAAGM

SEQ ID NO: 804 - protein, 242 aa, Corylus avellana
MEFQNQSMSVSPQRKLGRGKIEIKRIENTTNRQVTFCKRRNGLLKKAYELSVLCDAEIALIVFSSRGRLYEYANNSSVKTTIERYKKACADSSNSGSVSEANTQFYQQEAAKLRGQIRSVQDSNRHMLGEALSELNFKELKNLEKNLEKGINRIRSKKNELLLAEIEYMHKREVDLHNNNQFLRAKIAENERNQQNLNVMPGGGNYELMQSQSFDSRNYFQVDALQPNHHYPRQDQMALQLV

SEQ ID NO: 805 - protein, 271 aa, Methanosarcina mazei Goe1
MKTELKAVLKRPKISEKFDELREKKEGALIGYVMAGDPTFEASSEVVKALAKGGADIIELGFPFSDPVADGPTIQVAGQRALAEGMDIERYFAFARALEVDVPLVCMTYYNPVFRYGVEKFVENAAEAGISGLIIPDIPVEEAADLKTGCDAHGLDLIFLVAPTTTEARIRKILQRGSGFIYLVSRLGVTGARDDVAGSTKELLSRVNTDIPKAVGFGISTGEQAAEVRKAGADGVIVGSAFVRIIEEGTDVNERLETLARELKSGMLEAN

SEQ ID NO: 806 - protein, 1108 aa, Arabidopsis thaliana
MSPAAVEIGSPVEKVSSVLNPMENFSAFFPESVHSHDQRTMGSSFSFGFGAGSGQTTKTRHKPRLVKLRKNGREVKKPSFSGEILSGFNPFAPPGKGSLHMNSGNDRDAGQSPGDKCFVFGASGNSSGAKSSPGNATIASLSDEEEFSTPIGDSELDSESIKEHSNGVRGKVDNDRENIRPCSESTIFDATNGFRFDGGVNGSWKSVENPDAVKEFFRRQNGMDKASASKSCSKSNSVQYAHGKNRDDPELNLLADMEKLNISDSRVHGGSDYEEASKSNKTPVFTFSSFGKVDPICKEGAATSEPYSFSSNGFQQSNNASGENPTFHSQTTYGNNLTNTSFATKTFFDDFKVPEWDPSLLKDSLFPEVDRNPVHARSNRSSKDKRSKKVKEKMKQGEPDRCNGQTAEGIEAQEKLNSPGYCSPMDYSPYQGDKTSNQFPTETPLAPSHSREHIDSRSSNDFKVASARDSSLFTAEDHGSTCIPNFSFSASTSQETIRHKKLQAVKKYRRKVNNSLPKSNLNATMRNNQENQPVNTGQAKQDSGSTSMMPDVCEVWRLRGNQAYKNGYMSKAEECYTHGINSSPSKDNSEYSVKPLALCYGNRAAARISLGRLREAISDCEMAASLDPSYIKAYMRAANCHLVLGELGSAVQYFNKCMKSTSSVCLDRRTTIEAAEGLQQAQRVADFTSCASIFLEKRTPDGASDALVPIANALSISSCSDKLLQMKAEALFMIRRYKEVIELCENTLQTAERNFVSAGIGGTTNVNGLGSTYHSLIVWRWNKISKSHFYLGNLEKALDILEKLQQVEYTCNENQEECRESPASLVATISELLRYKNAGNEAVRDRKYMEAVEQYTAALSRNVDSRPFAAICFCNRAAANQALVQIADAIADCSLAMALDENYTKAVSRRATLHEMIRDYDQAASDLQRLISILVKQSDKTKTPETSVDRASSRKELKQARQRLSVMEEKSKEGIHLDFFLIMGVKTSDSAADIKKAYRKAALRHHPDKAAQILVRSESEGPWLKEILEEVHKGADRLFKMIGEAYSVLSDPTKRSDYELEEEIRKARASRESYRSRKAAEASSPPYQTSRRYWKDSWRTNQNTPSWW

SEQ ID NO: 807 - protein, 374 aa, Hevea brasiliensis
MAISSSTSGTSSSLPSRTTVMLLLIFFTASLGITDAQVGVCYGMQGNNLPPVSEVIALYKQSNIKRMRIYDPNRAVLEALRGSNIELILGVPNSDLQSLTNPSNANSWVQKNVRGFWSSVLFRYIAVGNEISPVNGGTAWLAQFVLPAMRNIHDAIRSAGLQDQIKVSTAIDLTLVGNSYPPSAGAFRDDVRSYLDPIIGFLSSIRSPLLANIYPYFTYAGNPRDISLPYALFTSPSVVVWDGQRGYKNLFDATLDALYSALERASGGSLEVVVSESGWPSAGAFAATFDNGRTYLSNLIQHVKGGTPKRPNRAIETYLFAMFDENKKQPEVEKHFGLFFPDKRPKYNLNFGAEKNWDISTEHNATILFLKSDM

SEQ ID NO: 808 - protein, 456 aa, Capparis spinosa
  unsure (1)..(456): unsure at all Xaa locations
IGPVLDVAFPPGKMPNIYNALVVKGRDTLGQQINVTCEVQQLLGNNRVRAVAMSATDGLMRGMEVIDMGTPLSVPVGGATLGRIFNVLGEPVDNLGPVDTRTTSPIHKSAPAFIQLDTKLSIFETGIKVVDLLAPYRRGGKIGLFGGAGVGKTVLIMELINNIAKAHGGVSVFGGVGERTREGNDLYMEMKESGVINEQNLPESKVALVYGQMNEPPGARMRVGLTALTMAEYFRDVNEQDVLLFIDNIFRFVQAGSEVSALLGRMPSAVGYQPTLSTEMGSLQERITSTKKGSITSIQAVYVPADDLTDPAPATTFAHLDATTVLSRGLAAKGIYPAVDPLDSTSTMLQPRIVGEEHYETAQRVKQTLQRYKELQDIIAILGLDELSEEDRLTVARARKIERFLSQPFFVAEVXTGSPGKYVGLVETIRGFKLILSGELDSLPEQAFYLVGNIDE

SEQ ID NO: 809 - protein, 473 aa, Geum sp. 'Chase 2507 K'
EKKNPGRIGSIIGPVLDVAFPTGKMPNIYNALVVKGRDTVGQPINVACEVQQLLGNNRVRAVAMSATDGLTRGMEVIDTGAPLSVPVGGATLGRIFNVLGEPVDNLGPVDTGTTSPIHRSAPAFIQLDTKLSIFETGIKVVDLLAPYRRGGKIGLFGGAGVGKTVLIMELINNIAKAHGGVSVFGGVGERTREGNDLYMEMKESGVINEQNIPESKVALVYGQMNEPPGARMRVGLTALTMAEYFRDVNEQDVLLFIDNIFRFVQAGSEVSALLGRMPSAVGYQPTLGTEMGSLQERITSTKEGSITSIQAVYVPADDLTDPAPATTFAHLDATTVLSRGLAAKGIYPAVDPLDSTSTMLQPRIVGEDHYETAQRVKETLQRYKELQDIIAILGLDELSEDDRLTVARARKIERFLSQPFFVAEVFTGSPGKYVGLTETIRGFKLILSGELDGLPEQAFYLVGNIDEATAKAM

SEQ ID NO: 810 - protein, 1022 aa, Saccharomyces cerevisiae
GAIYSVSGPVVIAENMIGCAMYELVKVGHDNLVGEVIRIDGDKATIQVYEETAGLTVGDPVLRTGKPLSVELGPGLMETIYDGIQRPLKAIKEESQSIYIPRGIDTPALDRTIKWQFTPGKFQVGDHISGGDIYGSVFENSLISSHKILLPPRSRGTITWIAPAGEYTLDEKILEVEFDGKKSDFTLYHTWPVRVPRPVTEKLSADYPLLTGQRVLDALFPCVQGGTTCIPGAFGCGKTVISQSLSKYSNSDAIIYVGCFAKGTNVLMADGSIECIENIEVGNKVMGKDGRPREVIKLPRGSETMYSVVQKSQHRAHKSDSSREMPELLKFTCNATHELVVRTPRSVRRLSRTIKGVEYFEVITFEMGQKKAPDGRIVELVKEVSKSYPVSEGPERANELVESYRKASNKAYFEWTIEARDLSLLGSHVRKATYQTYAPILYENDHFFDYMQKSKFHLTIEGPKVLAYLLGLWIGDGLSDRATFSVDSRDTSLMERVTEYAEKLNLCAEYKDRKEPQVAKTVNLYSKVVRGNGVRNNLNTENPLWDAIIGLGFLKDGVKNIPSFLSTDNIGTRETFLAGLIDSDGYVTDEHGIKATIKTIHTSVRDGLVSLARSLGLVASVNAEPAKVDMNGTKHKISYAIYMSGGDVLLNVLSKCAGSKKFRPAPVATFVRECQGFYFELQELKENDYYGITLSDDSDHQFLLANQVVVHNCGERGNEMAEVLMEFPELYTEMSGTKEPIMKRTTLVANTSNMPVAAREASIYTGITLAEYFRDQGKNVSMIADSSSRWAEALREISGRLGEMPADQGFPAYLGAKLASFYERAGKAVALGSPDRTGSVSIVAAVSPAGGDFSDPVTTATLGITQVFWGLDKKLAQRKHFPSINTSVSYSKYTNVLNKFYDSNYPEFPVLRDRMKEILSNAEELEQVVQLVGKSALSDSDKITLDVATLIKEDFLQQNGYSTYDAFCPIWKTFDMMRAFISYHDEAQKAVANGANWSKLADSTGDVKHAVSSSKFFEPSRG

SEQ ID NO: 811 - protein, 328 aa, Enterococcus hirae
ENMSEASIQDMCLVGDLGVIGEIIEMRQDVASIQVYEETSGIGPGEPVRSTGEALSVELGPGIISQMFDGIQRPLDTFMEVTQSNFVGRGVQLPALDHEKPWWFEGTIEGGTEGSSGNLIGYLDETKVIQPKIMVPNGIKGTVQKIESGSFTIDDPICVIETEQGLKELTMMQKWPVRRGRPIKQKLNPDVPMITGQRVIDTFFPVTKGGAAAVPGPFGAGKTVVQHQIAKWSDVDLVVYVGCGERGNEMTDVVNEFPELIDPNTGESLMERTVLIANTSNMPVAAREASIYTGITIAEYFRKMGNKLAIMANSPFWWAEAPPENSRR

SEQ ID NO: 812 - protein, 225 aa, Prochlorococcus marinus str. MIT 9313
MSFPAACLFDLDGVLLDTEPLHAQAWSQTAAVFATSLSTSQLLMLKGRRRLDCAQLVNNWLNTPVGIEQLLAVRQPIAKHLLSQAKAMPGAEELVRWCYDHRLPMAMASSSTADAVAFKSIHHSWLAQIQTRVLGDDLSLTAGKPAPDPYLLAARRLAVKPTACWALEDSQAGTQAALAAGCHVWVLSENEVHINCDGKFKDENPRQIAQLKTVLDHLQQAWDAL

SEQ ID NO: 813 - protein, 481 aa, Salacia pallescens
  unsure (1)..(481): unsure at all Xaa locations
GVXXLEKKNLGRIAQIIGPVLDVAFSPGKMPNIYNALVVKGRDTSGHTINVICEVQQLLGNNQVRAVAMSATDGLMRGMDVIDTGAPLSVPVGGATLGRIFNVLGEPVDNLGPVDTRTTSPIHKSAPAFIQLETKLSIFETGIKVVDLLAPYRRGGKIGLFGGAGVGKTVLIMELINNIAKAHGGVSVFGGVGERTREGNDLYMEMKESGVINEQNIAESKVALVYGQMNEPPGARMRVGLTALTMAEYFRDVNEQDVLLFIDNIFRFVQAGSEVSALLGRMPSAVGYQPTLSTEMGSLQERITSTKKGSITSIQAVYVPADDLTDPAPATTFAHLDATTVLSRGLAAKGIYPAVDPLDSTSTMLQPRIVGEEHYETAQRVKQTLQRYKELQDIIAILGLDELSEEDRLTVARARKIERFLSQPFFVAEVFTGSPGKYVGLAETIRGFKLILSGELDGLPEQAFYLVGNIDEAILKXTXLE

SEQ ID NO: 814 - protein, 422 aa, Azospirillum brasilense
MSKSSSGDSKNTLYCSFCGKSQHEVRKLIAGPTVFICDECVELCMDIIREENKTTLVKSRDGVPTPRDIHAVLDDYVIGQHHAKRVLSVAVHNHYKRLAHGTKHNDVELAKSNILLVGPTGCGKTLLAQTLARIIDVPFTMADATTLTEAGYVREDVENIILKLLQAARLQRRAAQRGIVYIDEVDKISRKSDNPSITRDVSGEGVQQALLKIMEGTVASVPPQGGRKHPQQEFLQVDTSNILFICGGAFAGLDKIIAQRGKGTSIGFGADVRGPDERSTGDILREVEPEDLLKFGLIPEFIGRLPVVATLSDLDETALVEILTKPKNALVKQYQRLFEMEDVRLEFSDDALRTISHKAIQRKTGARGLRSIMESILLDPMFDLPGLSGVESILVNKEVVEGRAKPLYVHAERRGEQQAPGA

SEQ ID NO: 815 - protein, 480 aa, Schisandra chinensis
  unsure (1)..(480): unsure at all Xaa locations
NLGRITQIIGPVLDVAFPPGKMPNIYNSLVVKGRDTVGQQINVTCEVQQLLGNNRVRAVAMSATDGLMRGMKVIDTGAPLSVPVGGSTLGRIFNVLGEPVDNLGPVDTLTTSPIHRSAPAFIQLDTKLSIFXTGIKVVDLLAPYRRGGKIGLFGGAGVGKTVLIMELINNIAKAHGGVSVFGGVGERTREGNDLYMEMKESGVINEQNIAESKVALVYGQMNEPPGARMRVGLTALTMAEYFRDVNEQDVLLFIDNISRFVQAGSEVSALLGRMPSAVGYQPTLSTEMGSLQERITSTKEGSITSIQAVYVPADDLTDPAPATTFAHLDATTVLSRGLAAKGIYPAVDPLDSTSTMLQPRIVGEEHYETAQRVKQTSQRYKELQDIIAILGLDELSEEDRLTVARARKIERFLSQPFFVAEVFTGSPGKYVGLAETIRGFQLILSGELDGLPEQAFYLVGNIDEATAKAMNLEVESKXKK

SEQ ID NO: 816 - protein, 473 aa, Hydrogenophilus thermoluteolus
MRHTKIVATLGPASSDPATLERLLLAGVDVVRLNFSHGTADEHRARASLVRALAQQTQRPVGILGDLQGPKIRIGRFTTNAVTLSKGQRFRLDCDLAPGDATRVGLDYPELIDDVEVGDILLLDDGKIRLQIVEKCADALITQVLVGGTLSNHKGINKLGGGLSAPALTAKDRAVPISRSLPKSASITVAVSFVKHAEEMHEARHLARAAGSRARLIAKIERVEAIANLDAILEASDGVMVARGDLAVEVGDAAVPALQKRILRRAREMNRLSITATQMMESMVHSPVPTRAEVSDVANAVLDGTDAVMLSAETAAGQYPVEAVEAMARVCAEADASNDAHLDQELLGRRFHRVDEAIAVSAVWSGYHLGVKAIVALTQSGATALWMSRIASILPIYALTPDPVTFGHLTLFRQVTPVRFDLNPASDPAMLLTQIRTLLVSNGWAAPGETIAVTFGEPMGQPGGSNTLKIVTL

SEQ ID NO: 817 - protein, 202 aa, Bifidobacterium longum DJO10A
MPLEGTRKHKEQDTAQMDTRGILFICGGAFVGLTDIVRKRLGRRETGFGANWHDADMKDEELLEQVNADDLAEFGLLPEFIGRLPVTSVLKELTVDDLTAILTQPANALIKQYRKLFAVDGVDLQFTEQAIRAIADIAIKQGTGARGLRSIIERTLQDTMFQLPSLDDVKQVIVDKASVEGSSTPKLLREAVDVPQGRLKVA

SEQ ID NO: 818 - protein, 198 aa, Escherichia coli
EKCIRARKVVITATQMLDSMIKNPRPTRAEAGDVANAILDGTDAVMLSGESAKGKYPLEAVSIMATICERTDRVMNSRLEFNNDNRKLRITEAVCRGAVETAEKLDAPLIVVATQGGKSARAVRKYFPDATILALTTNEKTAHQLVLSKGVVPQLVKEITSTDDFYRLGKELALQSGLAHKGDVVVYGFWCTGTERHY

SEQ ID NO: 819 - protein, 490 aa, Stirlingia latifolia
GPGVSTLEEKNLGRIAQIIGPVLDVAFPPGKMPNIYNALVVKGRDTVGQQINVTCEVQQLLGNNRVRAVAMSATDGLMRGMEVIDTGAPLSVPVGGATLGRIFNVLGEPIDNLGPVDTRTTSPIHRSAPAFIQLDTKLSIFETGIKVVDLLAPYRRGGKIGLFGGAGVGKTVLIMELINNIAKAHGGVSVFGGVGERTREGNDLYMEMKESGVINEQNIAESKVALVYGQMNEPPGARMRVGLTALTMAEYFRDVNEQDVLLFIDNIFRFVQAGSEVSALLGRMPSAVGYQPTLSTEMGSLQERITSTKEGSITSIQAVYVPADDLTDPAPATTFAHLDATTVLSRGLAAKGIYPAVDPLDSTSTMLQPRIVGEEHYETAQRVKQTLQRYKELQDIIAILGLDELSEEDRLTVARARKIERFLSQPFFVAEVFTGSPGKYVGLAETIRGFQLILSGEFDGLPEQAFYLVGNIDEATAKAMNLEVESSLKK

SEQ ID NO: 820 - protein, 445 aa, Nostoc sp. PCC 7120
MSKYDSHLKCSFCGKSQEQVRKLIAGPGVYICDECVDLCNEILDEELLDTSGAAAQPAPKSEPPQKRRARSSNLSLSQIPKPREIKKYLDEHVIGQDEAKKVLSVAVYNHYKRLAILQSKGSGKNGDDAVELQKSNILLIGPTGCGKTLLAQTLAKILDVPFAVADATTLTEAGYVGEDVENILLRLLQVADLDVEEAQRGIIYIDEIDKIARKSENPSITRDVSGEGVQQALLKMLEGTVANVPPQGGRKHPYQDCIQIDTSNILFICGGAFVGLEKVVDQRGGKKSIGFVQPGEGQSKEKRAADVLRHLEPDDLVKFGMIPEFIGRVPMVAVVDPLDEEALMAILTQPRSALVKQYQKLLKMDNVQLDFKPDALKAIAQEAYRRKTGARALRGIVEELMLDVMYELPSRKDVTRCTVTREMVEKRSTAELLVHPSSLPKPESA

SEQ ID NO: 821 - protein, 498 aa, Eremosyne pectinata
  unsure (1)..(498): unsure at all Xaa locations
XXXXPTTSSSGVSTLEKKNLGRIAQIIGPVLDVAFPPGKMPNIYNALVVKGRDTVGEPINVTCEVQQLLGNNRVRAVAMSATDGLTRGMEVIDMGAPLSVPVGGATLGRIFNVLGEPVDNLGPVDTGTTSPIHRSAPAFIQLDTKLSIFETGIKVVDLLAPYRRGGKIGLFGGAGVGKTVLIMELINNIAKAHGGVSVFGGVGERTREGNDLYMEMKESGVINEQNIAESKVALVYGQMNEPPGARMRVGLTALTMAEYFRDVNEQDVLLFIDNIFRFVQAGSEVSALLGRMPSAVGYQPTLSTEMGSLQERITSTKEGSITSIQAVYVPADDLTDPAPATTFAHLDATTVLSRGLAAKGIYPAVDPLDSTSTMLQPAIVGEEHYEIAQRVKQTLQRYKELQDIIAILGLDELSEEDRLTVARARKIERFLSQPFFVAEVFTGSPGKYVGLAETIRGFQLILSGELDGLPEQAFYLVGNIDEATAKAMNLEMESNLKK

SEQ ID NO: 822 - protein, 221 aa, Streptomyces coelicolor A3(2)
MTATASTVLPARALLLDMDGTLVNSDAAVDRVWRRWADRHGLDGDEVMKVVHGRQGYASMALLLPDRPMEHNHADNARMLAEETADTEGVVAIPGAAEFLASLRGLPHALVTSADVALSTARMAAAGLAQPDVRVTAESVGASKPDPEGFLKGAAELGIAPADCVVFEDSGAGIAAGRAAGMRVVGVGPRAGFHGPDVVVEDLTRVRVEADADGGLRLHIG

SEQ ID NO: 823 - protein, 601 aa, Schizosaccharomyces pombe
MSGRRNETAIRELVQSVSGNNLCADCSTRGVQWASWNLGIFLCLRCATIHRKLGTHVSKVKSISLDEWSNDQIEKMKHWGNINANRYWNPNPLSHPLPTNALSDEHVMEKYIRDKYERKLFLDENHSTNSKPPSLPPRTKSSSQSSPMASTSTSKSRYADSLSTLHDMGFSDDSVNTHALEETNGDVTRAIEKIVQHGSSKPQKPSTLTSTKSTIKLVSARLKKRNKNLSVHFEDGTKPGDAYEVTGDTRAASPTLNPFEQMMAMTNQGMSVSPGVETTSSPFFTAPVEPNQPLQPLRPSMTGPVPSSMGSEATLNMPSTYGIDSNLYTNSNSSSIVQNPLQPARTGPAAINYNYTTNYSVSSPSVTNPFFDVGSSTQNASLMGSTGYPSSANNVYYENSYQGVGTSMSDNYQLPDMSKLSLNEQPAAPSNSNSQYMNTSMPTLDSTNMYGQSNQDPYSMSNGVYGSNYSAQPSTMQMQATGIAPPQPNMSMQMPMSMQSTGYQMPMENTWVDYNGMSQQGNGMQPATMNYSNSMGYDTNVPADNGYYQQGYGNVMMPPDASYTGTGSYVQPMNQPSGGMGAPADSSKADSYIQRIMQGKQ

SEQ ID NO: 824 - protein, 278 aa, Shewanella oneidensis MR-1
MNSISNQTIPHQASRYQAAFSRLKAEGRGAFVPFVTLGDPSPELSLKIIDTLVQNGADALELGFPFSDPLADGPVIQGANLRALAAGTTPTACFELLAKIRAKYPELPIGLLLYANLVFANGIDAFYAKAQQAGVDSVLIADVPVEEAAPFIQAAKAHGIAPIFIAPPNADSDTLAKVSQSGEGYTYLLSRAGVTGADTKAGTPVEEILAKLQEFNAPPPLLGFGIAEPAQVSAAIKAGAAGAISGSAVVKIIETHQQDEVKLLAALGEFTRTMKAAT

SEQ ID NO: 825 - protein, 467 aa, Staphylococcus epidermidis ATCC 12228
MDTNGIKLTPKDIVSKLNEYIVGQNDAKRKVAIALRNRYRRSLLKEEEKQEIAPKNILMIGPTGVGKTEIARRMAKIVGAPFIKVEATKFTEVGYVGRDVESMVRDLVDVAVRLVKDEKKSLVKDEATKKANDKLVKLLVPSLKKKAAQGNNPLENLFGGAIPNFGQNQDEEEEPPTEEIKTKRSEIKKQLEQGKLENEKVRIKVEQDPASMGMLGTNQNQQIQDMMNQLMPKKKVEREVSVETARKILADDFADELIDQETANQQALELAEQMGIIFIDEIDKVATNNQNSGQDVSRQGVQRDILPILEGSMIQTKYGTVNTEHMLFIGAGAFHVSKPSDLIPELQGRFPIRVELESLSVEDFVRILTEPKLSLVKQYEALLQTEEVTVNFSEDAIQRLAEIAYQVNQDTDNIGARRLHTILEKMLEDLSFEAPSMPNAVVDITPQYVDDKLKSISTNKDLSAFIL

SEQ ID NO: 826 - protein, 119 aa, Oryza sativa
  unsure (1)..(119): unsure at all Xaa locations
MVLDATYLKAISRRATLYEMIRDYGQAANDLRKLISLIEKQANNSGXXGIEPSSSPADIKKAYRKAALRHHPDKAAQLLVRNEKPDDGLRDVAKEVHADADHLFKAIGEAYNVLSDSDK

SEQ ID NO: 827 - protein, 496 aa, Vigna unguiculata
MASLDKNMLLNYVPVYVMLPLGVVSVNNVFEDPEGLKEQLVQLREAGVDGVMVDVWWGIIEQKGPKQYDWSAYKSLFQLVQECGLKLQAIMSFHQCGGNVGDVVNIPIPQWVLDIGESDPDIFYTNRSGTRDKEYLTIGVDNKPIFHGRTAIEVYSDYMKSFRENMSDFLKSEVIIDIEVGLGPAGELRYPSYPQNQGWVFPGIGEFQCYDKYLKAEFKAAAARAGHSEWELPDDAGTYNDVPESTEFFKTNGTYLTEKGKFFLTWYSNQLLNHGDEILDEANKAFLGCKVNLAIKVSGIHWWYKAQNHAAELTAGYYNLDDRDGYRPIAKMVSRHHASLNFTCLEMRDSEQSSDAQSGPQELVQQVLSGGWRENIEVAGENALSRYDATAYNQIILNARPQGVNKDGPPKHRMYGVTYLRLSDELLQQSNFDIFKKFVVKMHADQDYCEDPQEYNHGIPPLKRSEPKIPVDVLNEATKPIPPFPWDSETDMKVDG

SEQ ID NO: 828 - protein, 495 aa, Kniphofia uvaria
MRINPTTSGTAFSALEETNVGRIAQIIGPELDVVFPPGKMPNIYNALVVKGRDIVGQQINVTCEVQQLLGNNRVRAVAMSATDGLTRGMEVINTGAPLIVPVGGATLGRIFNVLGEPVDNIGPVDTRTTSPIHRSAPAFIQLDTKLSIFETGIKVVDLLAPYRRGGKIGLFGGAGVGKTVLIMELINNIAKAHGGVSVFGGVGERTREGNDLYMEMKESGVINEKNIAESKVALVYGQMNEPPGARMRVGLTALTMAEYFRDVNEQDVLLFIDNIFRFVQAGSEVSALLGRMPSAVGYQPTLSTEMGSLQERITSTKEGSITSIQAVYVPADDLTDPAPATTFAHLDATTVLSRGLAAKGIYPAVDPLDSTSTMLQPRIVGEEHYEIAQRVKQTLQRYKELQDIIAILGLDELSEEDRLTVARARKIERFLSQPFFVAEVFTGSPGKYVALAETIRGFQLILSGELDGLPEQAFYLVGNIDEGTAKAMNLEVRAN

SEQ ID NO: 829 - protein, 498 aa, Gustavia superba
  unsure (1)..(498): unsure at all Xaa locations
XXXXXXXXXXXXXXLEKKNLGRIVQIIGPVLDVAFPPGKMPNIYNALVVKGRDTVGQPINVTCEVQQLLGNNRVRAVAMSATDGLTRGMEVIDTGAPISVPVGGATLGRIFNVLGEPIDNLGPVDTSTTSPIHRSAPAFIQLDTKLSIFETGIKVVDLLAPYRRGGKIGLFGGAGVGKTVLIMELINNIAKAHGGVSVFGGVGERTREGNDLYMEMKESGVINEQNIAESKVALVYGQMNEPPGARMRVGLTALTMAEYFRDVNEQDVLLFIDNIFRFVQAGSEVSALLGRMPSAVGYQPTLSTEMGSLQERITSTKEGSITSIQAVYVPADDLTDPAPATTFAHLDATTVLSRGLAAKGIYPAVDPLDSTSTMLQPRIVGEEHYETAQRVKQTLQRYKELQDIIAILGLDELSEEDRLTVARARKIERFLSQPFFVAEVFTGSPGKYVGLAETIRGFQLILSGELDGLPEQAFYLVGNIDEATAKAMNLEMESNLKK

SEQ ID NO: 830 - protein, 415 aa, Oryza sativa
  unsure (1)..(415): unsure at all Xaa locations
MEAGAGSSSAKLVAACVIGGIVLGASVVALHLAGPVAIPALPPVDALRRRFRRGRRRPVRVYMDGCFDMMHYGHCNALRQARALGDELIVGVVSDDEITANKGPPVTPLHERLIMVRAVKWVHDVIPDAPYAITEDFMNKLFNEYNIDYIIHGDDPCLLPDGTDAYALAKKVGRYKQIKRTEGVSTTDIVVNKLXGRMLLCVRERSASDSHNHSSLQRQFSHGHGQKIDDSGSXXGPGPDSRIVYIDGAFDLFHAGHVEILRLARELGDFLLVGIHTDQTISSTRGPHRPIMNLHERSLSVLACRYVDEVIIGAPWDVSKDMELLDATAIIEHGTAMHAQLTDMDDLNPYAVPRAMGIYRRLESPLDITTSTIIRRIVANHEAYQSVALLLQKRNEKKEASEKKYYDSKSFVNGE

SEQ ID NO: 831 - protein, 200 aa, Arabidopsis thaliana
MSSAIVVSQDAESLGLQIYSRKEKSLGVLVSNFLRLYNRDDVDLIGLDDAAGQLGVERRRIYDVVNILESIGIVARRGKNQYSWKGFGEIPRSLDELKEEGMRERLGYSSSNNSDKVSNGCEREEPLTLTPDDQENSSSSKMDQKKEKSLWLLAQNFVKMFLCSDDDLITLDSAAKALLSDSPDSVHMRSTSIFPVLDLF

SEQ ID NO: 832 - protein, 437 aa, Cabomba caroliniana
INVTCEVQQLLGNNRVRAVAMSATDGLRRGMEVIDTGAALSVPVGGATLGRIFNVLGEPVDNLGPVDTRTTSPIHRSAPAFIQLDTKLSIFETGIKVVDLLAPYRRGGKIGLFGGAGVGKTVLIMELINNIAKAHGGVSVFGGVGERTREGNDLYMEMKESGVINEENIAESKVALVYGQMNEPPGARMRVGLTALTMAEYFRDVNEQDVLLFIDNIFRFVQAGSEVSALLGRMPSAVGYQPTLSTEMGSLQERITSTKEGSITSIQAVYVPADDLTDPAPATTFAHLDATTVLSRGLAAKGIYPAVDPLDSTSTMLQPRIVGEEHYETAQRVKQTLQRYKELQDIIAILGLDELSEEDRLTVARARKIERFLSQPFFVAEVFTGSPGKYVGLAETIRGFQLILSGEFDSFPEQAFYLVGNIDEATSKAINLEVESK

SEQ ID NO: 833 - protein, 593 aa, Pyrobaculum aerophilum str. IM2
MSGKIEYISGPVVKAELPGARLYELVFVGEIKLFGEVVRIQGEKAFIQVYEDTTGLKPGEPVERTGEPLSAWLGPTIIGKIYDGVQRPLRNIEEISKNPFIARGIGYDKAPPLDLKAEFDFKPAVKPGEEVYPGDVLGSVKETEPMTHYILYPPLPEHAPGVVEWIADGKYKVDDVIARVKTKRGVVEVKMWHKWPVRRPRPFKEKLPPVEPLITGVRTVDTMFPIAKGGTAAVPGPFGSGKTVMIRTLSMFAQSRFIIPVLCGERGNEAADALQGLLKLKDPSTGRPLLERTTIIVNTSNMPVAAREASVYMGTTLGEYFRDQGYDVLVLADSTSRWAEAMREVALRIGEMPSEEGYPAYLPTRLAEFYERAGRVVLYGSKERVGSLTIAASVSPPGGDFTEPVTSNTLRFIGAFWPLSPRLAYSRHYPAIDWLVAFSRYVDTVEVWWSKNVSPEWRRIRDALQSILVKEAELQEIVRILGTEALSEYEKHILNVAFMIREGFLKQDAYNPVDTPSAPIKQFLLMKAIYTYYEEGLKAIESGVPASVLRELETVKRLPRLRMEVTNDVAKEELTKFIESLVAEIRATTNRRG

SEQ ID NO: 834 - protein, 423 aa, Brucella melitensis biovar Abortus
MSKVSNGGGDSKNTLYCSFCGKSQHEVRKLIAGPTVFICDECVELCMDIIREENKSSMVKSREGVPTRRQIMAVLDDYVIGQKDAKRVLSVAVHNHYKRLAHQSKNSDIELAKSNILLVGPTGCGKTYLAQTLARIIDVPFIMADATTLTEAGYVGEDVENIILKLLQAADYNVERARSIVYIDEVDKISRKSDNPSITRDVSGEGVQQALLKIMEGTVASVPPQGGRKHPQQEFLQVDTTNILFICGGAFAGLDRIISARGEKTSIGFGATVKSVDERRIGEVFKELEPEDLLKFGLIPEFVGRLPVIATLEDLDVDALVQILTEPKNALVKQYQRLFDMENVELVFHDDALRAIANKAVERKTGARGLRSIMEKILLDTMFELPTLEGVREVVISGDVVDGSARPLYIYAERQDEKGNVSA

SEQ ID NO: 835 - protein, 242 aa, Glycine max
MEDPNQAQEGSSQKKMGRGKIEIKRIENTTNRQVTFCKRRNGLLKKAYELSVLCDAEVALVVFSTRGRLYEYANNSVRATIERYKKANAAASNAESVSEANTQFYQQESSKLRRQIRDIQNLNRHILGEALGSLSLKELKNLEGRLEKGLSRVRSRKHETLFADVEFMQKREIELQNHNNYLRAKIAEHERAQQQQSNMMSGTLCESLPSQSYDRNFFPVNLIASDDQQQYSRQDHTALQLV

SEQ ID NO: 836 - protein, 242 aa, Shigella dysenteriae
LKERKEGAFVPFVTLGDPGIEQSLKIIDTLIEAGADALELGIPFSDPLADGPTIQNATLRAFAAGVTPAQCFEMLALIRQKHPTIPIGLLMYANLVFNKGIDEFYAQCEKVGVDSVLVADVPVEESAPFRQAALRHNVAPIFICPPNADDDLLRQIASYGRGYTYLLSRAGVTGAENRAALPLNHLVAKLKEYNAAPPLQGFGISAPDQVKAAIDAGAAGAISGSAIGKIIEQHINEPEKML

SEQ ID NO: 837 - protein, 269 aa, Lycopersicon esculentum
MVFPINQELLVDESSSQLRKTSGGTGGGGRGKIEIKRIENTTNRQVTFCKRRNGLLKKAYELSVLCDAEVSLIVFSSRGRLYEYANNSVRATIDRYKKHHADSTSTGSVSEANTQYYQQEASKLRRQIRDIQTYNRQIVGEALGSLSPRDLKNLEGKLEKAIGRVRSKKNELLFSEIELMQKREIELQNANMYLRAKIAEVERAQEQMNLMPGGGGGGGGGGGGGSDHQYHHQPNYEDARNNSLPVNLLEPNPHYSRRDNGDQTPLQLV

SEQ ID NO: 838 - protein, 481 aa, Tacca plantaginea
STLEEKNLGRIAQIIGPVLDVVFPPGKMPNIYNALVVKGRDTAGQQINVTCEVQQLLGNNRVRAVAMSATDGLMRGMEVIDTGAPLSVPVGEVTLGRIFNVLGEPVDNLGPVDTRTTFPIHRSAPAFIQLDTKLSIFETGIKVVDLLAPYRRGGKIGLFGGAGVGKTVLIMELINNIAKAHGGVSVFGGVGERTREGNDLYMEMKESGVINEKNIAESKVALVYGQMNEPPGARMRVGLTALTMAEYFRDVNEQDVLLFIDNIFRFVQAGSEVSALLGRMPSAVGYQPTLSTEMGSLQERITSTKEGSITSIQAVYVPADDLTDPAPATTFAHLDATTVLSRGLAAKGIYPAVDPLDSTSTMLQPRIVGEEHYETAQKVKQTSQRYKELQDIIAILGLDELSEEDRLTVARARKIERFLSQPFFVAEVFTGSPGKYVGLAETIRGFQLILSGELDGLPEQAFYLVGNIDEATTKAMNLEVE

SEQ ID NO: 839 - protein, 268 aa, Haemophilus influenzae Rd
MSRFETQFATLNAKNEGAFVPFVTLCDPTFDRSFEIICTLVDNGADALELGFPFSDPLLDGPVIQAANNRALTAGHSSEDSLKLLEKVRSKYPEIPISLLLCANLIFAKGLDAFYQRCAEVGVDAVLVADIPLLAKGDYVQTAKKHGIQPVFICPPNADEKTIQGVAKNSEGYTYLVSRAGVTSAENQAHAANLDTLVEKLKAHNAPPILQGFGIAQPEQVKEALSLGTAGAISGSATVKIIERNLDNHEQCLAELAEFVQTMKAATK

SEQ ID NO: 840 - protein, 472 aa, Helicteres baruensis
  unsure (1)..(472): unsure at all Xaa locations
IIGPVLDVAFPPGKMPNIYNALVVKGRXTVGQQINVTCEVQQLLGNNRVRAVAMSATDGLMRGMEVIDTGAPLSVPVGGATLGRIFNVLGEPVDNLGPVDTRTTSPIHKPAPAFIQLDTKLSIFETGIKVVDLLAPYRRGGKIGLFGGAGVGKTVLIMELINNIAKAHGGVSVFGGVGERTREGNDLYMEMKESGVINEQNLAESKVALVYGQMNEPPGARMRVGLTALTMAEYFRDVNQQDVLLFIDNIFRFVQAGSEVSALLGRMPSAVGYQPTLSTEMGSLQERITSTKEGSITSIQAVYVPADDLTDPAPATTFAHLDATTVLSRGLAAKGIYPAVDPLDSTSTMLQPRIVGEEHYETAQRVKQTLQRYKELQDIIAILGLDELSEEDRLTVARARKIERFLSQPFFVAEVFTGSPGKYVGLAETIRGFKLILSGELDSLPEQAFYLVGNIDEATAKATNLEMESKLK

SEQ ID NO: 841 - protein, 470 aa, Salmonella typhimurium
MKKTKIVCTIGPKTESEEMLSKMLDAGMNVMRLNFSHGDYAEHGQRIQNLRNVMSKTGKKAAILLDTKGPEIRTIKLEGGNDVSLKAGQTFTFTTDKSVVGNNEIVAVTYEGFTSDLSVGNTVLVDDGLIGMEVTAIEGNKCICKVLNNGDLGENKGVNLPGVSIALPALAEKDKQDLIFGCEQGVDFVAASFIRKRSDVVEIREHLKAHGGENIQIISKIENQEGLNNFDEILEASDGIMVARGDLGVEIPVEEVIFAQKMMIEKCIRARKVVITATQMLDSMIKNPRPTRAEAGDVANAILDGTDAVMLSGESAKGKYPLEAVSIMATICERTDRVMNSRLDYNNDSRKLRITEAVCRGAVETAEKLEAPLIVVATQGGKSARAVRKYFPDATILALTTNEVTARQLVLSKGVVSQLVKEINSTDDFYRLGKDVALQSGLAQKGDVVVMVSGALVPSGTTNTASVHVL

SEQ ID NO: 842 - protein, 542 aa, Escherichia coli CFT073
MVSALWTVELNDSKTGTHVGLRHKHTFLCTLFRCHLSLERGTTTFVIPDSLSGSAPRKQVSPILLNLKTKTVMKKTKIVCTIGPKTESEEMLAKMLDAGMNVMRLNFSHGDYAEHGQRIQNLRNVMSKTGKTAAILLDTKGPEIRTMKLEGGNDVSLKAGQSFTFTTDKSVIGNSEMVAVTYEGFTTDLSVGNTVLVDDGLIGMEVTAIEGNKVICKVLNNGDLGENKGVNLPGVSIALPALAEKDKQDLIFGCEQGVDFVAASFIRKRSDVIEIREHLKAHGGENIHIISKIENQEGLNNFDEILEASDGIMVARGDLGVEIPVEEVIFAQKMMIEKCIRARKVVITATQMLDSMIKNPRPTRAEAGDVANAILDGTDAVMLSGESAKGKYPLEAVSIMATICERTDRVMNSRLEFNNDNRKLRITEAVCRGAVETAEKLDAPLIVVATQGGKSARAVRKYFPDATILALTTNEKTAHQLVLSKGVVPQLVKEITSTDDFYRLGKELALQSGLAHKGDVVVMVSGALVPSGTTNTASVHVL

SEQ ID NO: 843 - protein, 134 aa, Sorghum bicolor
MAAKMFALFALLALCASATSATHIPGHLPLVMPLGTMNPCTQYCMMQQRFARLLAWPIPMLQQLSLQPAYQTPMTMPNMMPPMTMMPSMMSLPQCHCDAISQIMQQQQLPFMFNPTAMAIPPMFLQQPFVSSAF

SEQ ID NO: 844 - protein, 142 aa, Triticum aestivum
  unsure (1)..(142): unsure at all Xaa locations
TPGTERDSVCTPPGASIDHFCSPGCRKIYKRLKKLLGFKNNMEAGFSWSLVRCFAESEAAPSEKESRIXYCNSKTAVAFSVMNECFLPRIDERSGINIIHNVVYDCGSDFNRLNFSDFYTFILERGEEVISAATVRIHGTEL

SEQ ID NO: 845 - protein, 466 aa, Chorilaena quercifolia
GHIAQIIGPVLDVAFPPGKMPNIYNALVVKSRDTAGQPINVTCEVQQLLGNNRVRAVAMSATDGLTRGMEVIDTGAPLSVPVGGATLGRIFNVLGEPVDNLGPVDTRTTSPIHKSAPAFIQLDTRLSIFETGIKVVDLLAPYRRGGKIGLFGGAGVGKTVLIMELINNIAKAHGGVSVFGGVGERTREGNDLYMEMKESGVINEQNIAESKVALVYGQMNEPPGARMRVGLTALTMAEYFRDVNEQDVLLFIDNIFRFVQAGSEVSALLGRMPSAVGYQPTLSTEMGSLQERITSTKEGSITSIQAVYVPADDLTDPAPATTFAHLDATTVLSRGLAAKGIYPAVDPLDSTSTMLQPRIVGEEHYETAQRVKQTLQRYKELQDIIAILGLDELSEEDRLTVARARKIERFLSQPFFVAEVFTGSPGKYVGLAETIRGFKLILSGELDVLPEQAFYLVGNVDEVTAK

SEQ ID NO: 846 - protein, 586 aa, Oceanobacillus iheyensis HTE831
MRNTKIVCTIGPASESIEKLEQLIEAGMNVARLNFSHGDYAEHGARIENIRKAAKNKNKTVAILLDTKGPEIRTGSFKEGRADLMQGNPVTIAMDEVEGTAEKFSVTYQGLINDVHEGSKILLDDGLIELEVKSIDKSKGEIETIALNSGEIKNKKGVNVPNVSVNLPGITEKDTNDIIFGIEQGVDFIAASFVRRASDILEIKEVLDQHQAQYIKIIPKIENQEGVDNIDSILEVSDGLMVARGDLGVEIPAEDVPLVQKKLIKQCNNAGKPVITATQMLDSMQRNPRPTRAEASDVANAIFDGTDAIMLSGETAAGTYPVESVQTMSNIALKAESALDHKQMLEERSQYVDMTITEAISQSVTHTASNLNVDTIITPTESGHTARMISKYRPKASILAVTFNEVVNRQLSLVWGVHAVLGKPATSTDEMLEIAVDKGLNTGICSRGSRVIITAGVPVGESGTTNLLKVHVIGDVIAKGQGIGRRSAYGHAVFAKTNKEALEKVQDGDILVTYATEKEMMPAIEKASAIITEEGGLTSHAAVVGLSLGIPVIVGVDNVFEILQDGQDITVDGNRGDIYAGHAGVL

SEQ ID NO: 847 - protein, 470 aa, Moritella marina
MKKTKIVCTIGPKTESVEKLTELVNAGMNVMRLNFSHGNFAEHSVRIQNIRQVSENLNKKIAVLLDTKGPEIRTIKLENGDDVMLTAGQSFTFTTDINVVGNKDCVAVTYAGFAKDLNPGAIILVDDGLIEMEVVATTDTEVKCTVLNTGALGENKGVNLPNISVGLPALSEKDKADLAFGCEQEVDFVAASFIRKADDVREIREILFNNGGENIQIISKIENQEGVDNFDEILAESDGIMVARGDLGVEIPVEEVIMAQKMMIKKCNKAGKVVITATQMLDSMISNPRPTRAEAGDVANAVLDGTDAVMLSGETAKGKYPVEAVSIMANICERTDNSMSSDLGANIVAKSMRITEAVCKGAVETTEKLCAPLIVVATRGGKSAKSVRKYFPKANILAITTNEKAAQQLCLTKGVSSCIVEQIDSTDEFYRKGKELALATGLAKEGDIVVMVSGALVPSGTTNTASVHQL

SEQ ID NO: 848 - protein, 417 aa, Campylobacter jejuni subsp. jejuni NCTC 11168
MEFLSIGVKIMPRKCSFCNEVENPQRRILANENDDAFICEYCVEGAYSIIYGEEKEFKEPKQSHNTEFKDITPKELKAYLDRYVIGQDRAKKVFSVGVYNHYKRLFKAELQDDDTELFKSNILLVGPTGSGKTLLAQTLAKFLDVPIAICDATSLTEAGYVGEDVENILTRLLQAADGDVQRAQKGIVFIDEIDKIARMSENRSITRDVSGEGVQQALLKIIEGSLVNIPPRGGRKHPNQEFIQIDTSNILFVCGGAFDGLETILKRKLGDKVVGFFDDAKEENKALLEKIEPDDLVHFGLIPELIGRLHVIASLNELNEEDMVRILTEPKNAIIKQYQKLFAIDGVNLKFEEDALRAIAQLALERKTGARGLRSIIEEMMVDLMFELPEYKDYDIVITKEVVKDNAKALLIKRKIS

SEQ ID NO: 849 - protein, 475 aa, Nemophila insignis
NLGRIVQIIGPVLDVAFPPGEMPNIYNALVVKGRDTAGQPINVTCEVQQLLGNNRVRAVAMSATDGLTRGMEVIDTGAPLSVPVGEATLGRIFNVLGEPVDNLGPVDTRTTSPIHRSAPAFIQLDTKLSIFETGIKVVDLLAPYRRGGKIGLFGGAGVGKTVLIMELINNIAKAHGGVSVFGGVGERTREGNDLYMEMKESGVINEENIAESKVALVYGQMNEPPGARMRVGLTALTMAEYFRDVNEQDVLLFIDNIFRFVQAGSEVSALLGRMPSAVGYQPTLSTEMGSLQERITSTKSGSITSIQAVYVPADDLTDPAPATTFAHLDATTVLSRGLAAKGIYPAVDPLDSTSTMLQPRIVGEEHYETAQRVKETLQRYKELQDIIAILGLDELSEEDRLTVARARKIERFLSQPFFVAEVFTGSPGKYVDLAETIRGFQLILSGELDGLPEQAFYLVGNIDEATAKAMNLETE

SEQ ID NO: 850 - protein, 477 aa, Swietenia macrophylla
  unsure (1)..(477): unsure at all Xaa locations
LEKKKMGQIAQIIGPVLDVPFPPGKMPNIYNALVVKGXBTVGQPINVTCEVQQLLGNNRXXAVAMIATDGLTRGMEVIDTGAPLSVPVGGATLGRIFNVLGEPVDNLGPVDTLTTSPIHKPAPAFIQLDTKLSIFETGIKVVDLLAPYRRGGKIGLFGGAGVGKTVLIMELINNIAKAHGGVSVFGGVGERTREGNDLYMEMKESGVINEQNIAESKVALVYGQMNEPPGARMRVGLTALTMAEYFRDVNEQDVLLFIDNIFRFVQAGSEVSALLGRMPSAVGYQPTLSTEMGSLQERITSTKEGSITSIQAVYVPADDLTDPAPATTFAHLDATTVLSRGLAAKGIYPAVDPLDSTSTMLQPRIVGEEHYETAQRVKQTLQRYKELQDIIAILGLDELSEEDRLTVARARKIERFLSQPFFVAEVFTGSPGKYVGLAETIRGFKLILSGELDGLPEQAFYLVGNIDEVTAKATNLE

SEQ ID NO: 851 - protein, 236 aa, Oryza sativa (indica cultivar-group)
MRSNGVIPLDYALFRPLPPNKEAVDANTLLHYTNVFDAVVDAAYFAMAYLNVTNVPVMVTETGWPHKGDPSNEPDATSDNADTYNSNLIRHVMNTTGTPKHPGVAVPTYIYELYDEDTRPGSTSEKYWGLFDMNGIPAYTLHLTGSGVLLANDTTNQTYCVAREGADEKMLQAALDWACGPGKVDCSALMQGQPCYDPDNVEAHATYAFNAYYHGMGMGSGTCYFSGVAVITTTDP

SEQ ID NO: 852 - protein, 397 aa, Oryza sativa (japonica cultivar-group)
MAAPKPIARLISHVILDLDGTLLNTDCVVSQVLKPFLVKNGKKWDSKKAHKLVGKTPYEAAAVVLEDYGLPYSTEEFLSMLTPMFNEQWCNIKALPGANRLIKHLKSNGVPAALASNSPRSNIDAKISCHQGWKESFSAIVGGDEVEKGKPSPDIFLEAAKRMNTNPPNCLVIEDSLPGVAAGKAAGMHVIAVPSVPKRTAEFSSADEVINSLLDVKPEKWGLPPFSDWIDDTLPIEPWFIGGPVIKGFGRGSKVLGIPTANLPAENFSDVLSEHTSGVYFGWAGLSTRGIFKMVMSIGWNPYFDNTEKTIEPWLLHDFGEDFYGEELRLVIVGYIRPEANFPSLESLIERIHEDARISDKALNLPLYAKYKDSPYLRNSLKEDNSANGNQSVIDSK

SEQ ID NO: 853 - protein, 353 aa, Triticum aestivum
GTWAERVADGRGEAGARGLLEPPGEVERPGPVRALLGAELRSHRQCPARVRQRPGPGTLRPAPHGVDGDLPGSADPDPEPLQEYARREPLPLPDPSTSAGCVRYDPVRTPRHRQVTYAVLPQTGYFEFIPLEKATGEETENSAAIHYIESEPVGLTEVEVGKIYEVVLTTFAGLYRYRLGDVVKIARFHNSTPELQFICRRSLVLSINIDKNTEKDLQLAVEEAAKLLEGEKLELVDFTSYVEKSSDPGRYVIFWELSSEATDDVLSGCANALDLAFLDAGYMGSRKIKTIGPLELRVLRKGTFREILLHFLTLGGAVSQFKTPRFVSPANGKVLQILNRNVAKSYFSTAYGL

SEQ ID NO: 854 - protein, 475 aa, Guaiacum sanctum
  unsure (1)..(475): unsure at all Xaa locations
PXXKNXGHIXQIIGPVLDVTFPPGKMPXIYNALVVNXXNTVGQZINVTCEVQQLLGNNRVRAVAMSATDGLMRGMEVIDTGAPLSVPVGGVTLGRIFNVLGEPVDNLGPVDTSTTSPIHKSAPAFIQLDTKLSIFETGIKVVDLLAPYRRGGKIGLFGGAGVGKTVLIMELINNIAKAHGGVSVFGGVGERTREGNDLYMEMKESGVINEKNLSESKVALVYGQMNEPPGARMRVGLTALTMAEYFRDVNEQDVLLFIDNIFRFVQAGSEVSALLGRMPSAVGYQPTLSTEMGSLQERITSTKKGSITSIQAVYVPADDLTDPAPATTFAHLDATTVLSRGLAAKGIYPAVDPLDSTSTMLQPRIVGEEHYETAQRVKQTLQRYKELQDIIAILGLDELSEEDRLTVARARKIERFLSQPFFVAEVFTGSPGKYVGLAETIRGFQLILSGELDSLPEQAFYLVGNIDEATAKATN

SEQ ID NO: 855 - protein, 484 aa, Thunbergia coccinea
  unsure (1)..(484): unsure at all Xaa locations
INPXXSGXGVSTLEKKNXGRXVQIIGPVXDVAFPPGKMPNIYNALIVKGRDTVGEPINVXCEVQQLLGNNRVRAVAMSATDGLMRGMEVIDTGAPLSVPVGGATLGRIFNVLGEPVDNLGPVDTSTTFPIHRSAPAFIQLDTKLSIFETGIKVVDLLAPYRRGGKIGLFGGAGVGKTVLIMELINNIAKAHGGVSIFGGVGERTREGNDLYMEMKESGVINEENIAESKVALVYGQMNEPPGARMRVGLTALTMAEYFRDVNEQDVLLFIDNIFRFVQAGSEVSALLGRMPSAVGYQPTLSTEMGSLQERITSTKEGSITSIQAVYVPADDLTDPAPATTFAHLDATTVLSRGLAAKGIYPAVDPLDSTSTMLQPRIVGEEHYETAQRVKQTLQRYKELQDIIAILGLDELSEEDRLTVARARKIERFLSQPFFVAEVFTGSPGKYVGLAETIRGFQLILSGELDGLPEQAFYLVGNIDEATAK

SEQ ID NO: 856 - protein, 462 aa, Krameria ixine
  unsure (1)..(462): unsure at all Xaa locations
IGPVLDVAFPPGKMXNIXNALLVKARNTVGQQINVTCEVQQLLGNNRVRAVAMSATDGLMRGMEVIDTGAPLSVPVGGVTLGRIFNVLGEPVDNLGPVDTSTTSPIHRPAPDFIQLDTKLSIFETGIKVVDLLAPYRRGGKIGLFGGAGVGKTVLIMELINNIAKAHGGVSVFGGVGERTREGNDLYMEMKESGVINEKNLAESKVALVYGQMNEPPGARMXVGLTALTMAEYFRDVNEQDVLLFIDNIFRLVQAGSEVSALLGRMPSAVGYQPTLSTEMGSLQERITSTKEGSITSIQAVYVPADDLTDPAPATTFAHLDATTVLSRGLAAKGIYPAVDPLDSTSTMLQPRIVGEEHYETAQRVKQTLQRYKELQDIIAILGLDELSEEDRLTVARARKIERFLSQPFFVAEVFTGSPGKYVGLAETIRGFQLILSGELDSLPEQAXYLVGNXDEATAKXT

SEQ ID NO: 857 - protein, 374 aa, Triticum aestivum
MGWLSCCKRSNGAQPGRKKKKDTTWRIFSLKELQLATNNFNYDNKLGEGGFGSVYWGQLWDGSQIAVKRLKSWSNKAEKEFAVEVEVLARVRPESLLSLRGYCAEGQERLIVYDYMQNLSLHSHLHGQHAAECHLGWERRMNIAIDSAEGIAYLHHHAIPHIIHRDVKASNVLLDANFQARVADFGFAKLIPDGATHVTTKVKGTLGYLAPEYAMLGKAKESCDVYSFGVLLLELASGKKPVEKINPTTKLTITEWALPLAREQKFKEMADPKLGDSFAEAEVKRMVLVGLACTQTKPEQRPVMSEVVEMLKGESAEKFSILENDDLFKPQQTTSSVQGTSGPCSSDAITEEKESKEDTIEEATDSSETVPSAR

SEQ ID NO: 858 - protein, 312 aa, Bradyrhizobium japonicum USDA 110
MPMLDVPHATTAEGGETNFDLRKEAEAAGITDTLQQLEQELVGLRPVKNRVRQIASLLLIERIRQRAGLASAPPTLHMSFTGNPGTGKTTVALRMAKILHGLGFVRRGQVISVTRDDLVGQYIGHTAPKTKEILKKAMGGVLFIDEAYYLHRPDNERDYGQEAIEILLQVMENQREDLVVILAGYGERMTSFFASNPGFRSRIAHHVEFPDYAEAELLVIAELMLKERGYRFSATAREAFERYIALRRTQPFFSNARSIRNAVDRMRLRQADRLVCDLDRVLDISDLETIDPVDVLASRVFSGGADVRSAKP

SEQ ID NO: 859 - protein, 138 aa, Ipomoea tabascana
HAAELTAGFYNVAGRDGYRPIARMLARHHATLNFTCLEMRDSEQPAEAKSAPQELVQQVLSSGWKEYIDVAGENALPRYDATAYDQMLLNVRPNGVNLNGPPKLKMSGLTYLRLSDDLLQTDNFQLFKKFVKKMHADL

SEQ ID NO: 860 - protein, 244 aa, Gossypium hirsutum
MVYPNESLEDSPQKKMGRGKIEIKRIENTTNRQVTFCKRRNGLLKKAYELSVLCDAEVALVAFSSRGRLYEYANNSVKATIERYKKASDSSNTGSVAEVNAQFYQQEADKLRNQIRNLQNANRHMLGESIGGLPMKELKSLESRLEKGISRIRSKKNELLFAEIEYMQKREIDLHNNNQLLRAKIAENERKQQSMNLMPGGSSANFEALHSQPYDSRNYFQVDALQPATNYYNPQLQQDQIALH

SEQ ID NO: 861 - protein, 247 aa, Helianthus annuus
MSFPNESGEMSPQRKLGRGKIEIKRIENTTNRQVTFCKRRNGLLKKAYELSVLCDAEVALIVFSSRGRLYEYANNSVKGTIDRYKKACLDPPSSGSVAEANAQFYQQEAAKLRQQIANLQNQNRQFYRNIMGESLGNMPAKDLKNLEGKLEKGISRIRSKKNELLFAEIEYMPKRENELHNNNQFLRAKIAENERSQQQHMSLMPGSSDYDLVPPHQPFDGRNYLQVNDLQPNNSYSCQDQTPLQLV

SEQ ID NO: 862 - protein, 498 aa, Gyrocarpus americanus
MRINPTTSGPGVSTLEGKNLGRIAQIIGPVLEVAFPPGKMPNIYNALVVKGRDTVGQQINVTCEVQQLLGNNRVRAVAMSATDGLMRGMEVIDTGAPLSVPVGGATLGRIFNVLGEPVDNLGPVDTRTTSPIHRPAPAFIQLDTKLSIFETGIKVVDLLAPYRRGGKIGLFGGAGVGKTVLIMELINNIAKAHGGVSVFGGVGERTREGNDLYMEMKESGVINEENIAESKVALVYGQMNEPPGARMRVGLTALTMAEYFRDVNEQDVLLFIDNIFRFVQAGSEVSALLGRMPSAVGYQPTLSTEMGSLQERITSTKEGSITSIQAVYVPADDLTDPAPATTFAHLDATTVLSRGLAAKGIYPAVDPLDSTSTMLQPRIVGEEHYETAQRVKQTSQRYKELQDIIAILGLDELSEEDRLTVARARKIERFLSQPFFVAEVFTGSPGKYVGLAETIRGFQLILSGELDGLPEQAFYLVGNIDEATAKGMNLEVESNLKK

SEQ ID NO: 863 - protein, 488 aa, Quercus rubra
GVSALEKKKLGSIAQIIGPVLDVTFPPRKMPNIYNALVVKGRDTAGQQINVTCEVQQLLGNNRVRAVAMSATDGLMRGMEVIDTGAPLSVPVGGATLGRIFNVLGEPVDNLGPVDTRTTSPIHRSAPAFIQLDTKLSIFETGIKVVDLLAPYRRGGKIGLFGGAGVGKTVLIMELINNIAKAHGGVSVFGGVGERTREGNDLYMEMKESGVINEQNIAESKVALVYGQMNEPPGARMRVGLTALTMAEYFRDVNEQDVLLFIDNIFRFVQAGSEVSALLGRMPSAVGYQPTLSTEMGSLQERITSTKEGSITSIQAVYVPADDLTDPAPATTFAHLDATTVLSRRLAAKGIYPAVDPLDSTSTMLQPRIVGEEHYETAQRVKQTLQRYKELQDIIAILGLDELSEEDRLTVARARKIERFLSQPFFVAEVFTGSPGKYVGLSETIRGFKLILSGELDGLPEQAFYLVGNIDEATAKATNLEMESKLKQ

SEQ ID NO: 864 - protein, 183 aa, Chlamydia trachomatis
MSKLTQVFKQTKPCIGYLTAGDGGTSYTIEAAKALIQGGVDILELGFPFSDPVADDPEIQVSHDRALAENLTSETLLEIVEGIRAFNQEVPLILYSYYNPLLQRDLDYLRRLKDAGINGVCVIDLPAPLSHGEKSPFEDLLAVGLDPILLISAGTTPERMSLIQEHARGLLYYIPYKLREILK

SEQ ID NO: 865 - protein, 439 aa, Yersinia pseudotuberculosis
MLSLDQIPHHIRHGIVGSRLIQIRGRVTQVTGTLLKAVVPGVRIGELCYLRNPDNSLSLQAEVIGFAQHQALLIPLGEMYGISSNTEVSPTGTMHQVGVGEHLLGQVLDGLGQPFDGGHLPEPAAWYPVYQDAPAPMSRKLITTPLSLGIRVIDGLLTCGEGQRMGIFAAAGGGKSTLLASLIRSAEVDVTVLALIGERGPEVREFIESDLGEEGLRKAFLVVATSDRPSMERAKAGFVATSIAEYFRDQGKRVLLLMDSVTRFARAQREIGLAAGEPPTRRGYPPSVFAALPRLMERAGQSSKGSITALYTVLVEGDDMTEPVADETRSILDGHIILSRKLAAANHYPAIDVLRSASRVMNQIVSKEHKTWAGHLRRLLAKYEEVELLLQIGEYQKGQDKEADQAIERMGAIRGWLCQGTHELSHFNETLNLLETLTQ

SEQ ID NO: 866 - protein, 805 aa, Schizosaccharomyces pombe
MSALGELSTIHFKDLNPDVVAFQRSFVREIRRLTDTERLLRYLHSEIDLNGIHVPDHNLPPSYESVLESSTIEDIIERITRLEARVRQLVESSQLLEARYLQQLEFANVLTKADAFFSKSGNTVDPLRNNYETSSIFSGEDDTTAPLIENALELGTTGTFDSEETSPQMNTTLDFVSGIIPTVKFQFLERILWRTLRGNLFIHQVRADDSLIHGAEKNEEKTIFLVIAHGTQILLRIRKISESLGATLFPVEEDAPGRTSQIQQANVSISDLNAVLENTRSALYTELTFIAEHISAWEAVLHKDKTVFQVMNLFNYDQNHKCLIAEGWCPTANLPMVQKTLRNISDLTDSQAPTILNVVHTSEQPPTYFRVNKFTEGFQSIIDSYGIATYREVNHGIVAIVTFPFLFAIMFGDLGHGAIMASVALMFVLYEKTLGAKKDLDEIVGMVFYGRYIVLLMGLFSMYVGFVYNDLFSKPMSIFSSRWVWPVKSEEAIARAVQVGTYPIGIDPTWHSADNNLLFMNSYKMKLSIILGVIHMTFCLFLSLSNYRFFKRKLDIYAVFVPSLIFLEAIFGYLVITIVYKWCIDWKAKDLQPPSLLNMLILMFLSPGTLEDQLYPGQKYLQVGLVIAALICVPWLLIVKPFVLWRRHSNEENKYQSLNSDLPNVDEADALMAVDSQEKQAEPFELGEVVIHQVIHTIEFCLGCVSHTASYLRLWALSLAHNQLSSVLWNMTLANGFRMTGIVGSIFVVILFGFWFIATCVVLVAMEGTSAMLHSLRLHWVEGMSKHFEGEGYAFTPFTFKVTAE

SEQ ID NO: 867 - protein, 490 aa, Bonamia spectabilis
  unsure (1)..(490): unsure at all Xaa locations
MRINPTTSGXEVSAVEKKNLGRIVQIIGPVLDVAFPPGKMPNIYSALVIQGRDNEQMNVTCEVQQLLGNNRVRAVAMSATDGLMRGMEVIDTGAPISVPVGGATLGRIFNVLGAPVDNLGAVDTKTTSPIHRSAPAFIQLDTKLSIFETGIKVVDLLAPYRRGGKIGLFGGAGVGKTVLIMELINNIAKAHGGVSVFGGVGERTREGNDLYMEMKESRVINEENIAESKVALVYGQMNEPPGARMRVGLTALTMAEYFRDVNEQDVLLFIDNIFRFVQAGSEVSALLGRMPSAVGYQPTLSTEMGSLQERITSTKEGSITSIQAVYVPADDLTDPAPATTFAHLDATTVLSRGLAAKGIYPAVDPLDSTSTMLQPRIVGEEHYETAQRVKQTLQRYKELQDIIAILGLDELSEEDRLTVARARKIERFLSQPFFVAEVFTGSPGKYVGLAETIRGFELILSGELDVLPEQAFYLVGNIDEATVKAMNLKT

SEQ ID NO: 868 - protein, 262 aa, Cucumis sativus
MSKHYQSPLTRMIKEEGKGKLQIKGMFQNQEEKMSDSPQRKMGRGKIEIKRIENTTNRQVTFCKRRNGLLKKAYELSVLCDAEVALIVFSSRGRLYEYANNSVKATIDRYKKASSDSSNTGSTSEANTQFYQQEAAKLRVQIGNLQNSNRNMLGESLSSLTAKDLKGLETKLEKGISRIRSKKNELLFAEIEYMRKREIDLHNNNQMLRAKIAESERNVNMMGGEFELMQSHPYDPRDFFQVNGLQHNHQYPRQDNMALQLV

SEQ ID NO: 869 - protein, 483 aa, Asteropeia micraster
VSPLEKKNLGHIAQIIGPVLDVAFPPGKMPNIYNALVVKGQDTAGQPVSVTCEVQQLLGNNRVRAVAMSATDGLMRGMEVIDTGAPLSVPVGGATLGRIFNVLGEPVDNLGPVDTSTTSPIHRSAPAFTQLDTKLSIFETGIKVVDLLAPYRRGGKIGLFGGAGVGKTVLIMELINNIAKAHGGVSVFGGVGERTREGNDLYMEMKESGVINEQNIAESKVALVYGQMNEPPGARMRVGLTALTMAEYFRDVNEQDVLLFIDNIFRFVQAGSEVSALLGRMPSAVGYQPTLSTEMGSLQERITSTKEGSITSIQAVYVPADDLTDPAPATTFAHLDATTVLSRGLAAKGIYPAVDPLDSTSTMLQPRIVGEEHYETAQKVKQTLQRYKELQDIISILGLDELSEEDRLTVARARKIERFLSQPFFVAEVFTGSPGKYVGLSETIRGFQLILSGELDGLPEQAFYLVGNIDEATAKAMNLEMES

SEQ ID NO: 870 - protein, 1724 aa, Cryptococcus neoformans var. grubii
MGGRWEGGGMGRETWASESGWSQNEPNYPPSDYHGGPGYLPSRASTPTFEGSNAGHRPRDPYPAWTVDANIPLSKEEIEDVLIDLANKFGFQKDSSRNVYDFLMIQLDSRASRMSPNQALLTLHADYIGGEHANYRKWYFAAQLDLDDAIGAVQNPGLNRVRSVARRGGKTKNPLATAQEKSLESATSRWRTAMNNMSQYDRLRQVALYLLCWGEAAQVRFMPECLCFIFKCADDYYRSPECQNRQEAVPEGLYLRAVIKPLYRFLRDQGYEVVDGKFLRRERDHDKVIGYDDVNQLFWYPEGISRITLNDNTRLVDIPPAQRFMKFDRIDWNKVFFKTYLEKRSFFHLLVNFNRIWVLHISVFWFFTAYNAPSIYAPSGSTTATTPMAWSMTGLGGFVATLIMIAATLAEFSYIPTTWNNTSHLTRRLIFLLIILAITGGPSIYIAFFNQTGHVALILGIVQFFCSVVATIAFATLPSGRMFGDRVAGKSRKYLANQTFTASYPALGFYPRVASFLLWFLVFGCKFTESYFFLTLSFRDPMKVMNGMKVQNCHDKYFGNGLCTNQPAFALAVMFVMDLTLFFLDTFLWYVIWNTVFSIARSFAIGMSIWTPWKDIFARLPKRIYAKILATDDMEVKYKPKVLVSQVWNAVIISMYREHLLSIEHVQKLLYHQIQSDQPGKRTLRAPAFFISQSEKGSKAEFFPKGSEAERRICFFAQSLTTSIPAPIPVDAMPTFTVLVPHYSEKILLSLREIIREEDQNTRVTLLEYLKQLHPVEWDNFVRDTKILAEESDAFNGGNPFASDEKEEAKKADDIPFYTIGFKSAAPEYTLRTRIWASLRAQTLYRTVSGFMNYSKAIKLLYRVENPEVVQLFGGNTDQLERELERMARRKFKFVVSMQRYSKFNKEEHENAEFLLRAYPDLQIAYLDEEPPRKDGGESRIFSALIDGHSEIMPNGRRRPKFRIELPGNPILGDGKSDNQNHAIVFYRGEYLQLIDANQDNYLEECLKIRNVLGEFEEFKVSTQSPYAAQGHADFAKFPVAILGAREYIFSENIGILGDIAAGKEQTFGTLAARSLSYIGGKLHYGHPDFLNAIYMNTRGGVSKAQKGLHLNEDIFAGMLAFGRGGRIKHSEYYQCGKGRDLGFGTILNFQTKIGTGMGEQMLSREYYYLGTQLPIDRFLTFYYGHPGFHINNILVMMSVQVFMLALVFLGTLNKQLTVCRYSSGGDILPGQSGCYNLVPVFKWIKRCIISIFIVFWMAFVPLFVQELTERGTGRAILRLCKHFLSLSPVFEVFSTQIYMHSILNDLTFGGARYIATGRGFATTRISFSILYSRFAGPSIYLGMRTLVLLLFITLTVWVPHLIYFWITVVGLCVAPFLFNPHQFAIADFIIDYREFLRWMSRGNSRTHANSWVGYCRLSRTRVTGFKRKRLGLPSEKLSSDVPRAPWKAILIGEIIGPICLAILFVICYLFIKSFAVDGQIQPGLVRIAIIALGPIVWNMALLITLFLISVFLGPCLNSYTHQFGATMAALAHFGAVAGMLVFFELLWFLELWNTSHAVLGIIAVISVQRCIFKFLIAVFLSREFKHDETNRAWWTGVWFNRGLGSHALSQPAREFVVKTIEMGLYSADFIACHLLLALLTIPMFIPYFDRVHATMLFWLAPNQQIRPPIYSFRQRSQRRKIVFKYGLLYLIIQGIFIALIVVPIIFKDVAGLTPKSVPFNGII

SEQ ID NO: 871 - protein, 266 aa, Nostoc sp. PCC 7120
MTAISDRFETLKQNQECALIPFITAGDPDLETTAAALKILDSNGADFIELGIPYSDPLADGPVIQAAATRALQNGTKLERVLEMLKATIPSLRAPIILFTYYNPILHRGIDKFLEQIAAVGVAGLVVPDLPLEEAAGLLKPATERGIDLILLIAPTSSSERIEAIAHSSQGFIYLVSVTGVTGVRSQVEVRVSDLLRQIRQVTDKPIAVGFGISQPEQATQVKEWGADGAIVGSAFVQRLSAGTPAEGLSAIAEFCQSLKAAIKTS

SEQ ID NO: 872 - protein, 435 aa, Uncultured proteobacterium
MTDLTPREIVSELDRHIVGQNDAKRAVAVAMRNRWRRKQLPDELRDEVYPKNILMIGPTGVGKTEISRRLAKLARAPFLKVEATKFTEVGYVGRDVEQIIRDLVDSSIAVTRDHMREDVRARAKEAAEERVIEAIAGADARDATREMFRKKLRSGELDDTVIELEVADTSNPMSMLDLPGQPGSQMGMMNLGDIFGKAMGGRTSRKKMTVAASYDVLLGEEADKLLDDEIVTKAALKAVEQSGIVFLDEIDKVCARADARGADVSREGVQRDLLPLIEGTTVSTKHGPVKTDHILFIASGAFHVAKPSDLLPELQGRLPIRVELRDLTEEDFIRILSETENALTLQYSALMSTEDVSVSFSEDGIKALAQAAAEVNRSVENIGARRLYTVIERVFEELSFAAPDQAGSEVVIDKAYVNKHLDSLLQSTDLSRYVL

SEQ ID NO: 873 - protein, 421 aa, Chlamydophila pneumoniae CWL029
MNKKNLTICSFCGRSEKDVEKLIAGPSVYICDYCIKLCSGILDKKPSSTISSAPVSETPSQPSDLRVLTPKEIKKHIDEYVIGQERAKKTIAVAVYNHYKRIRALLHNKQVSYGKSNVLLLGPTGSGKTLIAKTLAKILDVPFTIADATTLTEAGYVGEDVENIVLRLLQAADYDVARAERGIIYIDEIDKIGRTTANVSITRDVSGEGVQQALLKIVEGTTANVPPKGGRKHPNQEYIRVNTENILFIVGGAFVNLDKIIAKRLGKTTIGFSDDQADLSQKTRDHLLAKVETEDLIAFGMIPEFVGRFNCIVNCEELSLDELVAILTEPTNAIVKQYMELFAEENVKLVFKKEALYAIAKKAKQAKTGARALGMILENLLRDLMFEIPSDPTVEAIHIQEDTIAENKAPIIIRRTPEAIA

SEQ ID NO: 874 - protein, 494 aa, Geobacillus stearothermophilus
MKRKTKIVCTIGPASESVDKLVQLMEAGMNVARLNFSHGDHEEHGRRIANIREAAKRTGRTVAILLDTKGPEIRTHNMENGAIELKEGSKLVISMSEVLGTPEKISVTYPSLIDDVSVGAKILLDDGLISLEVNAVDKQAGEIVTTVLNGGVLKNKKGVNVPGVKVNLPGITEKDRADILFGIRQGIDFIAASFVRRASDVLEIRELLEAHDALHIQIIAKIENEEGVANIDEILEAADGLMVARGDLGVEIPAEEVPLIQKLLIKKCNMLGKPVITATQMLDSMQRNPRPTRAEASDVANAIFDGTDAVMLSGETAAGQYPVEAVKTMHQIALRTEQALEHRDILSQRTKESQTTITDAIGQSVAHTALNLDVAAIVTPTVSGKTPQMVAKYRPKAPIIAVTSNEAVSRRLALVWGVYTKEAPHVNTTDEMLDVAVDAAVRSGLVKHGDLVVITAGVPVGETGSTNLMKVHVISDLLAKGQGIGASRRSARPL

SEQ ID NO: 875 - protein, 247 aa, Petunia x hybrida
MVFPNQEFESSSSQRKSGRGKIEIKRIENTTNRQVTFCKRRNGLLKKAYELSVLCDAEVALIVFSSRGRLYEYANNSVRATIDRYKKHHADSTSTGSVSEANTQYYQQEAAKLRRQIRDIQTYNRQIVGEALSSLSPRGLKNLEGKLEKAIGRVRSKKNELLFSEIELMQKREIEMQNANMYLRAKIAEVERATQQMNLMHGGGSEYQQQPMSSTSQPYDARNFLPVNLLEPNPHYSRQDQTALQLV

SEQ ID NO: 876 - protein, 450 aa, Synechococcus sp. PCC 7942
MSRYDSHLKCSFCGKSQEQVRKLIAGPGVYICDECVDLCNEILDEELFDGNANPAPPPGSPKPATAATTSHQGPRKPKRSLTLSQIPKPHDIKRYLDHHVIGQNEAKKMLSVAVYNHYKRLAYQQSAEFEAGETIEIQKSNILLIGPTGCGKTLLAQTLAKLLDVPFAVADATTLTEAGYVGEDVENILLRLLQVADLDIEEAQRGIIYIDEIDKIARKSENPSITRDVSGEGVQQALLKMLEGTIANVPPQGGRKHPYQDCIQIDTRNILFICGGAFVGLEKLVDRRLGKKSIGFVHPEESKTKEQRAAAILRHMEPEDLVQFGLIPEFIGRMPVTAVLDPLDETALTEILTEPRDALVKQYQKLMHMDSVELEFRQDAIEAIAREAFRRKTGARALRGIVEEIMLEVMYELPSRQDVTHCTITREMVEKRSSADVLLLPSSLPTPESA

SEQ ID NO: 877 - protein, 498 aa, Nymphaea odorata
  unsure (1)..(498): unsure at all Xaa locations
MRINPTTSGPRVSTLGKKFQGRIAQIIGPVLXVAFSTGKMPNIYNSLVVXGRDTAGQEINVTCEVQQLLGNNRVRAVAMSATDGLTRGMEVIDTGAPLSVPVGGATLGRIFNVLGEPVDNLGPVDTRTTSPIHRSAPAFTQLDTKLSIFETGIKVVDLLAPYRRGGKIGLFGGAGVGKTVLIMELINNIAKAHGGVSVFGGVGERTREGNDLYMEMKESGVINEENIAESKVALVYGQMNEPPGARMRVGLTALTMAEYFRDVNEQDVLLFIDNIFRFVQAGSEVSALLGRMPSAVGYQPTLSTEMGSLQERITSTKEGSITSIQAVYVPADDLTDPAPATTFAHLDATTVLSRGLAAKGIYPAVDPLDSTSTMLQPRIVGEEHYETAQRVKQTLQRYKELQDIIAILGLDELSEEDRLTVARARKIERFLSQPFFVAEVFTGSPGKYVGLAETIRGFQLILSGELDSFPEQAFYLVGNIDEATAKAMNLEVESKLKK

SEQ ID NO: 878 - protein, 498 aa, Aspidistra elatior
MRFNPTTSGPAVSTLDEKNLGRIAQIIGPVLDVVFPPGKMPNIYNALVVKGRDTVGQQINVTCEVQQLLGNNRVRAVAMSATDGLTRGMEVIDTGAPLSVPVGGATLGRIFNVLGEPVDNLGPVDTRTTSPIHRSAPAFIQLDTKLSIFETGIKVVDLLAPYRRGGKIGLFGGAGVGKTVLIMELINNIAKAHGGVSVFGGVGERTREGNDLYMEMKESGVINEKNIAESKVALVYGQMNEPPGARMRVGLTALTMAEYFRDVNEQDVLLFIDNIFRFVQAGSEVSALLGRMPSAVGYQPTLSTEMGSLQERITSTKEGSITSIQAVYVPADDLTDPAPATTFAHLDATTVLSRGLAAKGIYPAVDPLDSTSTMLQPGIVGEEHYETAQKVKQTLQRYKELQDIIAILGLDELSEEDRLTVARARKIERFLSQPFFVAEVFTGSPGKYVGLAETVRGFQLILSGELDSLPEQAFYLVGNIDEATAKAMNLERGGNLKK

SEQ ID NO: 879 - protein, 336 aa, Lycopersicon esculentum
MAFLSSLLASLLLVGLLIQITGAQPIGVCYGKIANNLPSDQDVIKLYNSNNIKKMRIYFPETNVFNALKGSNIEIILDVPNQDLEALANPSKRQGWVQDNIRNHFPDVKFKYIAVGNEVDPGRDSGKYARFVGPAMENIYNALSSAGLQNQIKVSTATYLGLLTNTYPPRDSIFRDEYKSFINPIIGFLSRHNLPLLANIYPYFGHADDNVPLPYALFKQQGLNDAGYQNLFDALVDSMYFATEKLGGQNIEIIVSESGWPSEGHPSATLENAMTYYTNLINHVKGGAGTPKKPGRTIETYLFAMFDENRKDGKPSEQHFGLFKPDQRPKYQLKFD

SEQ ID NO: 880 - protein, 61 aa, Triticum aestivum
LFEGKVAGGNGEQVLSRDVYRLGQLFDFFRMLTFFYTTVGYYVCTMVSLSPPFIISLLYCC

SEQ ID NO: 881 - protein, 520 aa, Saccharomyces cerevisiae
MLKSASQNFFRAYSSRIGRYAATASGKLAQSRLSNIPTPKALKKFLDEYIVGQEIGKKVLSVAVYNHYLRINDKQKKGELQRQRELMEREKIADDRDEPIFSGNSESKAGWRNLQRQFNLAGREVDEDLELSKSNVLVVGPSGSGKTLLATTLAKILNVPIAITDCTQLTQAGYIGEDVEVCIERLLVNAEFDVARAEKGIIVLDEIDKLAKPAASIGTKDVSGEGVQQSLLKIIEGHKVEITVKRPVKHDIDGQKNQTTTKKDEVFVVDTSNILFMIMGAFVGLDKHIVKRIEDMKKIQKAGESVESSNSKEVEKERAKKFRFSNTLEQVELDNGKKVCALDLTTPTDLVSFGLIPELIGRVPIITALQPLQRDDLFHILKEPKNALLDQYEYIFKQFGVRLCVTQKALKKVAQFALKEGTGARGLRGIMERLLLNVNYDCPGSNIAYVLIDEATVDSLQETEHSLASQVDVKYYSGDEKDSLIRDVSEEDKKLGVMLEKELGHSANIHTPTIPKRSLT

SEQ ID NO: 882 - protein, 208 aa, Triticum aestivum
MAFALNASCYPSSFQSSLLPRRMAAAVMIPRRRNVLPVIRAVAVAPPAPAPAKPAAVRSRPVSVTMAKLMAKGKTALIPYITAGDPDLATTAEALHLLDACGADVIELGVPCSDPYVDGPIIQASSARALAGGATMDGVLAMLKEVTPELSCPVVLFSYYRPILCRGLADIKEAGVHGLIVPDLPYVAAHALWSEAKKNNLELVLLTT

SEQ ID NO: 883 - protein, 478 aa, Glycine max
  unsure (1)..(478): unsure at all Xaa locations
MVEYASRTNLSYCRDYGIEEDSIDDMPLKSDPECYDDDGHLKRTGTIWTTSSHIITAVVGSGVLSLAWAIAQMGWIAGPAVMILFSIVTLYTSSFLADCYRTGDPMFGKRNYTFMDAVSTILGGYSVTFCGIVQYLNLFGSAIGYTIAASLSMMAIQRSHCIIQSSDGENQCNISSIPYTICFGAVQIFFSQIPDFHNMWWLSIVASVMSFTYSIIGLVLGITKIAETGTFKGSLTGISIGTVTEAQKXWGVFQALGNIAFAYSYSFVLLEIQDTIKSPPSEVKTMKKAAKLSIAVTTTFYMLCGCVGYAAFGDSAPGNLLAGFGFHKLYWLVDIANAAIVIHLVGAYQVYAQPLFAFVEKETAKRWPKIDKEFQISIPGLQSYNQNIFSLVCRTVFVIITTVISTLLPFFNDILGVIGALGFWPLTVYFPVEMYILQKRIPKWSMRWISLELMSVVCLLVTIAAGLGSVVGVYLDLQ

SEQ ID NO: 884 - protein, 623 aa, Brassica napus
MPAFYGGKLTTFEDDEKESEYGYVRKVSGPVVVADGMAGAAMYELVRVGHDNLIGEIIRLEGDSATIQVYEETAGLTVNDPVLRTHKPLSVELGPGILGNIFDGIQRPLKTIAKRSGDVYIPRGVSVPALDKDCLWEFQPKDFVEGDTITGGDLYATVFENSLMQHHVALPPDAMGKITYLAPAGQYSLKDTVLELEFQGVKKSFTMLQTWPVRTPRPVASKLAADTPLLTGQRVLDALFPSVLGGTCAIPGAFGCGKTVISQALSKYSNSDAVVYVGCGERGNEMAEVLMDFPQLTMTLPDGREESVMKRTTLVANTSNMPVAAREASIYTGITIAEYFRDMGYNVSMMADSTSRWAEALREISGRLAEMPADSGYPAYLAARLASFYERAGKVKCLGGPERNGSVTIVGAVSPPGGDFSDPVTSATLSIVQVFWGLDKKLAQRKHFPSVNWLISYSKYSTALESFYEKFDSDFIDIRTKAREVLQREDDLNEIVQLVGKDALAEGDKITLETAKLLREDYLAQNAFTPYDKFCPFYKSVWMMRNIIHFYNLANQAVERGAGMDGQKISYSLIKHRLGDLFYRLVSQKFEDPAEGEDVLVGKFKKLHDDLTSGFRNLEDETR

SEQ ID NO: 885 - protein, 585 aa, Staphylococcus epidermidis ATCC 12228
MRKTKIVCTIGPASESEEMLEKLMNAGMNVARLNFSHGSHEEHKARIDTIRKVAKRLNKTIGLLLDTKGPEIRTHNMKDGLIVLEKGKEVIVSMNEVEGTPEKFSVTYENLINDVNIGSYILLDDGLVELQVKEINKDKGEVKCDILNTGELKNKKGVNLPGVKVNLPGITDKDADDIRFGIKENVDFIAASFVRRPSDVLDIRQILEEEKAEITIFPKIENQEGIDNIEEILEVSDGLMVARGDMGVEIPPESVPMVQKDLIRKCNKLGKPVITATQMLDSMQRNPRATRAEASDVANAIYDGTDAVMLSGETAAGQYPEEAVKTMRNIAVSAEAAQDYKKLLSDRTKLVETSLVNAIGVSVAHTALNLNVKAIVAATESGSTARTISKYRPHSDIIAVTPSEKTARQCAIVWGVNPVVKEGRKTTDALLNNAVATAVETGRVSNGDLIIITAGVPTGEKGTTNMMKIHLVGDEIAKGQGVGRGSVVGHAIVADSASDLEGKDLSDKVIITNSVDETLVPYVEKAIGLITEENGITSPSAIIGLEKGIPTVVGVEQATKEIKNDMLVTLDASQGKVFEGYANVL

SEQ ID NO: 886 - protein, 402 aa, Coleochaete sieminskiana
LLGDNKVRAVSMSATDGIMRGMEAIDTGAPLSVPVGEATLGRIFNVLGEPVDELGPVDTTKVSPIHRPAPAFTQLDTKLSIFETGIKVVDLLAPYRRGGKIGLFGGAGVGKTVLIMELINNIAKAHGGVSVFGGVGERTREGNDLYMEMKESKVINSDNISESKVALVYGQMNEPPGARMRVGLTALTMAEYFRDINKQDVLLFIDNIFRFVQAGSEVSALLGRMPSAVGYQPTLSTEMGTLQERITSTKEGSITSIQAVYVPADDLTDPAPATTFAHLDATTVLSRGLAAKGIYPAVDPLDSTSTMLQPWIVGEEHYDTAQGVKKTLQRYKELQDIIAILGLDELSEEDRLLVARARKIERFLSQPFFVAEVFTGSPGKYVSLVETIKGFQMILSGDLDAL

SEQ ID NO: 887 - protein, 390 aa, Oryza sativa
  unsure (1)..(390): unsure at all Xaa locations
WTTRRSGGGGSSSSSSQAPPTPRAARSWRSPSTPPLPRPPPSPSSRLVGAIVEKGFSSGXRPPPRPPPPRXPTVLPFPVARHRSHGPHWKPAARDAAMAEGEGEEEEGMDVDETDYQPVAAAAGPVKRKEKKGMDFSRWREFVADDAPPKRRQAKPLQPKKQTAQKIDTGVVAATTGGTAQEKRSGGIAALMSDVAPRKPMKQVDARDDVRNVELRGEGMESDNGEPSLTAEINAENMARLAGMSAGEIAEAQAEILNRMDPAFVEMLKRRGKEKSGSRKDGGKGXXGGGISGPGKISKAMPGEWLSAGKKAHVETVGERDFLRTEGDPAAVGYTINEAVALSRSMNLHKTDLIDNFKXXSNDDDKFNDWQAVWAYAIGPEPELVLSLRX

SEQ ID NO: 888 - protein, 489 aa, Humulus lupulus
  unsure (1)..(489): unsure at all Xaa locations
INPXXXSSGXXALEKKNLGRIVQIIGPVLDVAFPPGKMPNIYNALVVXGRDTVGQQINVTCEVQQLLGNNRVRAVAMSATDGLMRGMDVIDTGAPLSVPVGGATLGRIFNVLGEPVDNLGPVDTRTTSPIHRSAPAFIQLDTKLSIFETGIKVVDLLAPYRRGGKIGLFGGAGVGKTVLIMELINNIAKAHGGVSVFGGVGERTREGNDLYMEMKESGVINEQNIAESKVALVYGQMNEPPGARMRVGLTALTMAEYFRDVNEQDVLLFIDNIFRFVQAGSEVSALLGRMPSAVGYQPTLSTEMGSLQERITSTKEGSITSIQAVYVPADDLTDPAPATTFAHLDATTVLSRGLAAKGIYPAVDPLDSTSTMLQPRIVGEEHYETAQRVKETLQRYKELQDIIAILGLDELSEDDRLTVARARKIERFLSQPFFVAEVFTGSPGKYVGLAETIKGFKLILSGELDGLPEQAFYLVGNIDEATAKATNLE

SEQ ID NO: 889 - protein, 585 aa, Bacillus anthracis str. A2012
MRKTKIVCTIGPASESIEKLEQLIEAGMNVARLNFSHGSHEEHGARIKNIREASKKTGKTVGILLDTKGPEIRTHDFVDGQAELVTGAEVVLSTEQVLGTAEKFSVSYAGLYDDVDPGSRILIDDGLIELEVIEKADGNIRTKVLNSGTVKNKKGVNVPNVSIKLPGITEKDVKDIIFGIEQKVDFIAASFVRKAADVLEIRELLEEHNAQYIQIVPKIENQEGIDNIDSILEVSDGLMVARGDMGVEIPPEEVPLVQKRLIKKCNVLGKPVITATQMLDSMQRNPRPTRAEASDVANAIFDGTDAIMLSGETAAGQYPVEAVTMMANIAVRVEKSLQYEDMFKKRIKEFTPTITDAISQSVAHTALALDVAAIVAPTESGYTAKMISKYRPKSPIVAVTSDEQVGRRLALVWGVQAFMAEKRAASTDEMLDTAIQTGMDAGLIGLGDTVVITAGVPVAETGTTNLMKIHVVGEEVAKGQGIGRKAAKGKVVVAKTAAEAVANVNEGDILVTTSTDKDMIPAIEKAAALVVEEGGLTSHAAVVGVSIGIPVIVGVNGVTATLKNGQEVTVDAARGIVYNGHAEVL

SEQ ID NO: 890 - protein, 186 aa, Saccharomyces bayanus
  unsure (1)..(186): unsure at all Xaa locations
ISDVGNAILDGADCVMLSGETAKGXYPINAVTTMAETAVIAEQAIAYLPNYDDMRNXTPKPTSTTETVAASAVAAVFEQKAKAIIVLSTSGNTPRLVSKYRPNCPIILVTRCPRAARFSHLYRGVFPFVFEKEPVSDWTEDVEARINFGIQKAKEFGILKDNDTYVSIQGFKAGAGHSNTLQVSTV

SEQ ID NO: 891 - protein, 479 aa, Buchnera aphidicola str. Bp (Baizongia pistaciae)
MIRRFRRTKIVATLGPSTDNHIILENMIKSGVNVFRLNFSHGTREEHIYRAKLVTSIAKRLNCHIALLGDLQGPKIRICKFQDKKVFLKVNNYFILDANLNENLGTSERVGIDYKNLPKDVKKCDILLLDDGKIQLKVINIVDQEIFTKIIIGGVLSNNKGINKLGGGLSARILTKKDKRDIITSIDIGVDYLAVSFPRYGSDLDHARKCAVKFGSKAKIIAKIERAEAVKDLKIIDEIILASDAIMVARGDLGVEIGESELAGIQKTLIRRARQLNRVVITATQMMESMINNPMPTRAEVMDVANAVLDGSDAVMLSAETASGKYPIETIKVMSKVCMGAEKMPSINVSQHRIHDKFHDIEEAIAMSAMYAANHLSGITAIITMTESGKTSLMTSRITSGLPIFALSSHIQTLKLTALYRGVTPIFFNSSKEGVSAANEVINLLVKRGFLEPGNLVIITQGDIMGKVGKTNTSRILKV

SEQ ID NO: 892 - protein, 627 aa, Medicago truncatula
MEETKFCALAFICAFFLLLLHPLWLVSANMEGDALHNLRTNLQDPNNVLQSWDPTLVNPCTWFHVTCNNDNSVIRVDLGNAALSGTLVPQLGQLKNLQYLELYSNNITGPIPSDLGNLTNLVSLDLYLNRFNGPIPDSLGKLSKLRFLRLNNNSLMGPIPMSLTNISALQVLDLSNNQLSGVVPDNGSFSLFTPISFANNLNLCGPVTGHPCPGSPPFSPPPPFVPPPPISAPGSGGATGAIAGGVAAGAALLFAAPAIAFAWWRRRKPQEFFFDVPAEEDPEVHLGQLKRFSLRELQVATDTFSNKNILGRGGFGKVYKGRLADGSLVAVKRLKEERTPGGELQFQTEVEMISMAVHRNLLRLRGFCMTPTERLLVYPYMANGSVASCLRERPPHQEPLDWPTRKRIALGSARGLSYLHDHCDPKIIHRDVKAANILLDEEFEAVVGDFGLAKLMDYKDTHVTTAVRGTIGHIAPEYLSTGKSSEKTDVFGYGIMLLELITGQRAFDLARLANDDDVMLLDWVKGLLKEKKLEMLVDPDLKTNYIEAEVEQLIQVALLCTQGSPMDRPKMSDVVRMLEGDGLAERWDEWQKGEVLRQEVELAPHPNSDWIVDSTENLHAVELSGPR

SEQ ID NO: 893 - protein, 559 aa, Mortierella alpina
DPMLQDSQGFNALHLATHSSNAMLVLYLLMAGEMPVDTADTLGHTSLMWAAYQGDSLSVQILLKHGARVDTKDREGFTPLHWAVVKGNRECLSKILMAGADIKAGDKSGKTPVDMIKELKGTMIWDKALSDAKLSSDGQTRRTPFDKLMVLFPWYIALPLAVAQFLFGHIGAIKFLLRTRTPNDMLQTPYYTAVFQSTAFWVGFVWLRYLLGNTSHLLWMNIAFFVGYTSALYFFYGAVMADPGWTKANSSYESQREAVVQMADRGLLDARHFCVSCIAQRPLRSKHCKFCNRCVAKFDHHCPWIYNCIGAKNHRAFLIFLALFLSSVPIYAYLSFEYLHVLSPSYVPVSSDPCLLGDTLCGYFQYDAFTTTLAFWSLFQMTWPGLLFLVQLYQVGQAKTTNEAMNFQRHSYLGKSMTIRQRILRSLTEIDSEMAGAGHPLQEESINLLEANGTATNDEDEVTLFAQEESKPVGFGDHEGHNHGARRAGGGGMWNLLVGTARRRRQQGEDRDVNPFDFGLWQNCVGFWSDGTQGPMRGVNWYSFYEAEARGGAATSRRM

SEQ ID NO: 894 - protein, 492 aa, Globularia salicina
  unsure (1)..(492): unsure at all Xaa locations
INPXXXXFGXSTLEKKNLERIVQIIXPVXDVAFPPGKMPNIYNALVVKXRDTVGQPINVXCEVQQLLGNNRVRAVAMSATDGLTRGMEVIDTGAPXSVPVGGATLGRIFNVLGEPIDNLGPVDTRTTFPIHRSAPAFIQLDTKLSIFETGIKVVDLLAPYRRGGKIGLFGGAGVGKTVLIMELINNIAKAHGGVSVFGGVGERTREGNDLYMEMKESGVINEENIAESKVALVYGQMNEPPGARMRVGLTALTMAEYFRDVNEQDVLLFIDNIFRFVQAGSEVSALLGRMPSAVGYQPTLSTEMGSLQERITSTKEGSITSIQAVYVPADDLTDPAPATTFAHLDATTVLSRGLAAKGIYPAVDPLDSTSTMLQPRIVGEEHYETAQRVKQTLQRYKELQDIIAILGLDELSEEDRLTVARARKIERFLSQPFFVAEVFTGSPGKYVGLAETIRGFQLILSGELDGLPEQAFYLVGNIDEATAKXMNLEMES

SEQ ID NO: 895 - protein, 578 aa, Methanosarcina barkeri
MEVKGEIYRVSGPVVTAIGLQAKMYDLVKVGNEGLMGEVIQILGPKTIIQVYEETAGIKPGEPCVSTGSSLSVELGPGLLSSIYDGVQRPLHVLLEKMGSFIQRGVSADGLDHKKLWDFKPIVKKGDSVKGGDVIGVVQETVNIEHKIMVPPDISGTISDIKSGNFTVVDTICTLTDGTELQMMQRWPVRRPRPVKAKLTPTRPLVTGMRILDGLFPVAKGGTAAIPGPFGSGKTVTQQSLAKWSDTEIVVYIGCGERGNEMADVLSEFPELEDPQTGRPLMERTVLIANTSNMPVAAREASVYTGITIAEYYRDMGLDVSLMADSTSRWAEAMREISSRLEEMPGEEGYPAYLSARLAEFYERAGVAESLCGETGSITVIGAVSPPGGDFSEPVTQNTLRIVKVFWALDAKLSQRRHFPAINWLNSYSLYKDSLNDWFADNVAPDYVPLRERAMEMLQTESELQEIVQLVGSDALPDDQQLLLEITRMLREIFLQQNAFHPVDAYSPFDQQYKILKAIMKWGDAAMDALKSGVPVTEIIKLESKNVLAKVKYEEKFDESMNAVLAQMDKEFASLRGR

SEQ ID NO: 896 - protein, 608 aa, Arabidopsis thaliana
MGGLIDLNVMETEEDETQTQTPSSASGSVSPTSSSSASVSVVSSNSAGGGVCLELWHACAGPLISLPKRGSLVLYFPQGHLEQAPDFSAAIYGLPPHVFCRILDVKLHAETTTDEVYAQVSLLPESEDIERKVREGIIDVDGGEEDYEVLKRSNTPHMFCKTLTASDTSTHGGFSVPRRAAEDCFPPLDYSQPRPSQELLARDLHGLEWRFRHIYRGQPRRHLLTTGWSAFVNKKKLVSGDAVLFLRGDDGKLRLGVRRASQIEGTAALSAQYNQNMNHNNFSEVAHAISTHSVFSISYNPKASWSNFIIPAPKFLKVVDYPFCIGMRFKARVESEDASERRSPGIISGISDLDPIRWPGSKWRCLLVRWDDIVANGHQQRVSPWEIEPSGSISNSGSFVTTGPKRSRIGFSSGKPDIPVSEGIRATDFEESLRFQRVLQGQEIFPGFINTCSDGGAGARRGRFKGTEFGDSYGFHKVLQGQETVPAYSITDHRQQHGLSQRNIWCGPFQNFSTRILPPSVSSSPSSVLLTNSNSPNGRLEDHHGGSGRCRLFGFPLTDETTAVASATAVPCVEGNSMKGASAVQSNHHHSQGRDIYAMRDMLLDIAL

SEQ ID NO: 897 - protein, 356 aa, Arabidopsis thaliana
MKPVFCGNFEYDARESDLERLFRKYGKVERVDMKAGFAFVYMEDERDAEDAIRALDRFEYGRTGRRLRVEWTKNDRGGAGRSGGSRRSSSGLRPSKTLFVINFDAQNTRTRDLERHFEPYGKIVNVRIRRNYAFIQYEAQEDATRALDATNSSKLMDKVISVEYAVKDDDSRGNGYSPERRRDRSPDRRRRSPSPYRRERGSPDYGRGASPVAHKRERTSPDYGRGRRSPSPYKRARLSPDYKRDDRRRERVASPENGAVRNRSPRKGRGESRSPPPYEKRRESRSPPPYEKRRESRSPPPYEKRRERSRSRSKSSPENGQVESPGQIMEVEAGRGYDGADSPIRESPSRSPPAEE

SEQ ID NO: 898 - protein, 459 aa, Xylella fastidiosa Ann-1
MPSKTDFTSSTMTPREIVQELDRHIVGQQAAKRLVAIALRNRWRRMQVPQELRNEVMPKNILMIGPTGVGKTEIARRLATLANAPFVKVEATRFTEVGYVGKDVEQIGRDLVDTAVKMYREQAKVRVRTQAEEYAEERILDALLPRRSLGIGFDADADAIRQEPSAHESETRAKFRRMLRSGELEEREIELDVAVNVSMDIMTPPGMEEMGQQLRQMFSNIGGGKSQKRKLTIKAARPLLIEEEAAKLVNEDEIRSAAIEACEQNGIVFIDEIDKVVKRGDTVGGGDVSREGVQRDLLPLVEGSNVSTKYGTIRTNHILFIASGAFHLTKPSDLIPELQGRFPIRVELDALSKADFIRILTEPKAALTKQYQELLKTEGVSLDFTEDAIDRIAEIAYLVNERQENIGARRLHTVLERLLETLSYESPDRDGESVTVDADYVNAHLGELVKDPDLSRYIL

SEQ ID NO: 899 - protein, 478 aa, Haemophilus influenzae Rd
MSRRLRRTKIVCTMGPSTDRDNNLEKIIAAGANVVRMNFSHGTPDDHIGRAERVRSIAKKLGKTVAILGDLQGPKIRVSTFKDGKIFLNVGDKFILDAELPKGEGTQESVGLDYKTLPQDVVPGDILLLDDGRVQLKVLSTDGAKVFTEVTVGGPLSNNKGINKLGGGLSADALTEKDKADIITAARIGVDFLAVSFPRSSADLNYARELAQQAGLNAKIVAKVERAETVANDEAMDDIILASDVIMVARGDLGVEIGDPELVGVQKKLIRRSRQLNRAVITATQMMESMISNPMPTRAEVMDVANAVLDGTDAVMLSAETAAGQYPSETVAAMASVCLGAEKMPSINVSRHRMDKEFETIEESVAMSAMYAANHMKGVAAIVTLSSTGRTPLLMSRISSGLPIFALSRNQETLNLCALYRGVTPIYHGEESRTEAGAKAAPQSLKEKGYLSTGDLVLVTQGGQGATQTNVCRTLIVE

SEQ ID NO: 900 - protein, 268 aa, Pseudomonas aeruginosa
MSRLQTRFAQLKQENRAALVTFVTAGDPDYASSLEILKGLPGAGADVIELGMPFTDPMADGPAIQLANIRALEGGQTLARTLQMVREFRSGDSETPLVLMGYFNPIHHYGVERFIAEAKEVGVDGLIVVDLPPEHNEDLCHPAQAAGLDFIRLTTPTTGDQRLPTVLEGSSGFVYYVSVAGVTGANAATLEHVEEAVARLRRHTDLPIGIGFGIRSAEHAAAVARLADGVVVGSALIDRIAKARDNAQAVKDVLALCGELAEGVRNAR

SEQ ID NO: 901 - protein, 238 aa, Streptomyces coelicolor A3(2)
MSTMGPLGGISVIFDLDGTLVDSEPHYYEAGRRTLAEYGVPDFSWADHEAYVGISTQETVADWKRRYGLRATVEELLAVKNRHYLGLARTSARAYPEMRKFVELLAGEGVPMAVASGSSPEAIAAILARTGLDAHLRTVVSADEVARGKPAPDVFLEAARRLGTEPARCVVLEDAAPGAAAAHAAGMRCIAIPYVSGQADAPEFATAELLVRGGQEEFTARAAHDWLRTDGNATRETI

SEQ ID NO: 902 - protein, 102 aa, Triticum aestivum
KSYNVAEKQPGQVNKSGFVYGPFHPCARKQEPDDCNNVGQRAIAHDWESLADSFRPQYQNPALGDLFAHYVDSWKSWYSEFSQGSSIMQQHLGSSVNNKRFL

SEQ ID NO: 903 - protein, 355 aa, Desulfitobacterium hafniense
MFVIFGQRSRPRRAGRALLPRLPARGPRRSAWQYRPRRAHGGFVGDMLGLASGFAGLRAIDGVLHFAPTLPQRWHGFGFGLRWQGRRLRIEVRRDGVEYSLLDGAPLTLAHAGHYVELSQGQPLRRALAAAEVDARERFPRPAQALIFDLDGVLTDTAQTHYRAWKRMADEEGLAFDQHVNERLKGVDRMSSLEIILRHAGRTLSAEQKLALAERKNGYYVEAIAEVTPADLFPGVTRVLERARARGLKLGLASASRNAAVLLDRLGIAERFDYIADAARIARAKPAPDIFLDVAAALGVAPAQCIGIEDAAAGVAAIKSAGMAAIGIGDARTLAQADACLPDIAAFDVDAFVSP

SEQ ID NO: 904 - protein, 267 aa, Bacillus subtilis var. natto
MFKLDLQPTEKLFIPFITAGDPVPEVSIELAKSLQKAGATALELGVAYSDPLADGPVIQRASKRALDQGMNIVKAIELGGEMKKNGVNIPIILFTYYNPVLQLNKEYFFALLQENHIDGLLVPDLPLEESNSLQEECKSHEVTYISLVAPTSESRLKTIIEQAEGFVYCVSSLGVTGVRNEFNSSVYPFIRTVKNLSTVPVAVGFGISNREQVIKMNEISDGVVVGSALVRKIEELKDRLISAETRNQALQEFEDYAMAFSGLYSLK

SEQ ID NO: 905 - protein, 300 aa, Glycine max
FGSRKLFDEYKIDYRLEGGGARAPAGGTDAYAHAKKAGRYKQIKRTEGVSSTDIVGRMLLCVRERSITEKNHNHSSLQRQFSNGHSPKFEAGASAATASGTRISHFLPTSRRIVQGSRTRLSRYKWEGSTEDSRIVYIDGAFDLFHAGHVEILRLARDLGDFLLVGIHTDQTVSATRGSHRPIMNLHERSLSVLACRYVDEVIIGAPWEISKDMLTTFNISLVVHGTIAESNDFQKEECNPYAVPISMGIFKVLESPLDITTTTIIRRIVSNHEAYQNRNKKKGESEKRYYEGKSHVSEE

SEQ ID NO: 906 - protein, 441 aa, Primula veitchiana
  unsure (1)..(441): unsure at all Xaa locations
MPNINKALVVKGRDTPGQPINVTCEVXQLLGNNRVRAVAMSATDGLTRGMEVIDTGAALSVPVGGATLGRIFNVLGEPVDNLGPVDTRTTSPIHRSAPAFIQLDTKLSIFETGIKVVDLLAPYRRGGKIGLFGGAGVGKTVLIMELINNIAKAHGGVSVFGGVGERTREGNDLYMEMKESGVINEENIAESKVALVYGQMNEPPGARMRVGLTALTMAEYFRDVNEQDVLLFIDNIFRFVQAGSEVSALLGRMPSAVGYQPTLSTEMGSLQERITSTKEGSITSIQAVYVPADDLTDPAPATTFAHLDATTVLSRGLASKGIYPAVDPLDSTSTMLQPRIVGEEHYEIAQRVKETLQRYKELQDIIAILGLDELSEEDRLTVARARKIERFLSQPFFVAEVLTGSPGKYVGLAETIRGFQLILSGELDSLPEQAFYLVGNI

SEQ ID NO: 907 - protein, 498 aa, Mentzelia lindleyi
  unsure (1)..(498): unsure at all Xaa locations
XXXXXXXXGPGISTLDKKNLGRIAQIIGPVLDVAFPPGKMPNIYNALVVKGRDTAGQPINVTCEVQQLLGNNRVRAVAMSATDGLMRGLEVIDTGAPLSVPVGGATLGRIFNVLGEPVDNLGPVDTRTTSPIHRSAPAFIQLDTKLSIFETGIKVVDLLAPYRRGGKIGLFGGAGVGKTVLIMELINNIAKAHGGVSVFGGVGERTREGNDLYMEMKESGVINEQNIAESKVALVYGQMNEPPGARMRVGLTALTMAEYFRDVNEQDVLLFIDNIFRFVQAGSEVSALLGRMPSAVGYQPTLSTEMGSLQERITSTKEGSITSIQAVYVPADDLTDPAPATTFAHLDATTVLSRGLAAKGIYPAVDPLDSTSTMLQPRIVGEEHYETAQRVKETLQRYKELQDIIAILGLDELSEEDRLTVARARKIERFLSQPFFVAEVFTGSPGKYVGLAETIRGFQLILSGELDGLPEQAFYLVGNIDEATAKAMNLEMESNLKK

SEQ ID NO: 908 - protein, 431 aa, Clostridium thermocellum ATCC 27405
MSRYDEKKQLKCSFCGKTQEQVKRLVAGPGVYICDECIELCSEIIEEEFEETRADAELNDIPKPSEIKEILDQYVVGQDTAKKALAVAVYNHYKRINSDVKGSDVELQKSNIVMLGPTGSGKTLLAQTLARILNVPFAIADATSLTEAGYVGEDVENILLKLIQAADYDIERAEKGIIYIDEIDKIARKSENPSITRDVSGEGVQQALLKILEGTIASVPPQGGRKHPHQEFIQIDTTNILFICGGAFDGIEKIIQNRIGKKSMGFGAKIESPKKANVGEILKNILPQDLLKFGLIPEFVGRLPVIVTLHSLDREALVKILTEPKNALVKQYQKLFEMDDVILEFEKEAIEAIADKAIERNTGARGLRAILEEIMLDVMYDIPSQENVEKCIITKDTVEKMVPPTVIINENKKSVKKPINKKSRVKKESAS

SEQ ID NO: 909 - protein, 277 aa, Haloferax volcanii
MSLEDAFSDGPAFVPYLAAGDPDYESSLEYVEALERGGADVIELGLPFSEPIAEGPTIQNAVVRSLEGGMTPTRFFEFVEDLDVSVPLVCMRYYNLIYRYGDEPGPRPFVEKAAEVGIEGFVVPDLPAEEAGPLREACDEFGLDLVFIVAPTTRGERLDRIMEQVSGYVYVQARLGTTGAQSSVSDQTDSSLERLTDYDVPKAVGFGISDGDHAERIVASGADGIIVGSALVDIVAEGHENGDDAETVADRLETLARELEDGAVAGASQRPPHPERT

SEQ ID NO: 910 - protein, 498 aa, Austrobaileya scandens
MRINPTTSGPGVSTLEGKNLGRIDQIIGPVLEVAFPPGKMPNIYNFLVVKGQDTVGQPINVTCEVQQLLGNNRVRAVAMSATDGLMRGMEVIDTGAPLSVPVGGATLGRIFNVLGEPVDNLGPVDTRTTSPIHRPAPAFIQLDTKLSIFETGIKVVDLLAPYRRGGKIGLFGGAGVGKTVLIMELINNIAKAHGGVSVSGGVGERTREGNDLYMEMKESGVINEQNIAESKVALVYGQMNEPPGARMRVGLTALTMAEYFRDVNEQDVLLFIDNISRFVQAGSEVSALLGRMPSAVGYQPTLSTEMGSLQERITSTKEGSITSIQAVYVPADDLTDPAPATTFAHLDATTVLSRGLAAKGIYPAVDPLDSTSTMLQPRIVGEEHYETAQRVKQTSQRYKELQDIIAILGLDELSEEDRLTVARARKIERFLSQPFFVAEVFTGSPGKYVGLAETIRGFQLILSGELDGLPEQAFYLVGNIDEATAKAMNLEVESKLKK

SEQ ID NO: 911 - protein, 474 aa, Glycine max
MSLPPPSLVTAATPTELPIRQIPGSYGFPLLGPISDRLDYFWFQKPESFFRKRVEKYKSTVFRTNVPPSFPFFVNVNPNVIAVLDVKSFSHLFDMDLVDKKDVLVGDFVPSVAFTGNMRVGVYQDTTEPQHSKVKNYIMDILKRSSGIWVSELESNLDTLWDNIEASLSKSSSVSYLFPLQQFLFTFLCKVLAGADPARDPKIAESGYSMLNSWLALQLLPTVSVGILQPLEEIFLHSFAYPFFLVGGNYNNLYNFIKQQGKDTINRGAIGFGLTEEEAIHNLLFVLGFNSYGGFSIFLPSLIDAIASNSALQEKLKKEAREKGGSTLTFDSVKEMDLIQSVVYETLRMNPPVPLQYGRARKDFRLSSHDSVFHVKKGELLCGFQKLVMRDSVIFDEPDRFKPDRFTQEKGAQLLNYLYWSNGPQTGSPSVSNKQCAGKDVVTLTAALIVAYLFRRYDSIQGDGSSITALQKTK

SEQ ID NO: 912 - protein, 532 aa, Oryza sativa (japonica cultivar-group)
MELKAMYLYAAVLAVLLCSSVNFIQSPTDVLGPVALLEPTPSSARDFGAVVSDAPFAVMRPESPDDIALLLGALSSTAPSPRATVAAVGAGHSLHGQAQARDGIVVETRALPRDVHVVSARAHGGDDDATVRAYADVGAGALWVEVLEECLKLGLAPPSWTDYLYLTVGGTLSNGGISGQTFKHGPQISNVLQLEVVTGKGEVVTCSPTEIPELFFAVLGGLGQFGIITRARIPLQLAPPKVRWVRAFYDSFETFTGDQELLVSMPEQVDYVEGFMVLNEQSLHSSSVAFPAQLNFSPDFGSKGRKKVYYCIEFAVHDFQQDSSRADHVVKLVSAKLSYLRPHVYSVEVSYFDFLNRVRMEEESLRSRGLWDVPHPWLNVFVPKHGITQFKGLLMDTVSADDFEGPILVYPLLTDKWDGNTSAVVPAAPDGVMYIFGVLRSTDPARCGRACVDSIMARHRRVADEACRDGGGGGRGIGAKQYLARQPSPARWRDHFGAGWGRFAARKARFDPLHVLGPGQGIFPRTDSAGSM

SEQ ID NO: 913 - protein, 480 aa, Arabidopsis thaliana
MVVQNVQDLDVLPKHSSDSFDDDGRPKRTGTVWTASAHIITAVIGSGVLSLAWAVAQIGWIGGPVAMLLFSFVTFYTSTLLCSCYRSGDSVTGKRNYTYMDAIHSNLGGIKVKVCGVVQYVNLFGTAIGYTIASAISLVAIQRTSCQQMNGPNDPCHVNGNVYMIAFGIVQIIFSQIPDFDQLWWLSIVAAVMSFAYSAIGLGLGVSKVVENKEIKGSLTGVTVGTVTLSGTVTSSQKIWRTFQSLGNIAFAYSYSMILIEIQDTVKSPPAEVNTMRKATFVSVAVTTVFYMLCGCVGYAAFGDNAPGNLLAHGGFRNPYWLLDIANLAIVIHLVGAYQVYCQPLFAFVEKEASRRFPESEFVTKEIKIQLFPGKPFNLNLFRLVWRTFFVMTTTLISMLMPFFNDVVGLLGAIGFWPLTVYFPVEMYIAQKNVPRWGTKWVCLQVLSVTCLFVSVAAAAGSVIGIVSDLKVYKPFQSEF

SEQ ID NO: 914 - protein, 1035 aa, Populus tremula x Populus tremuloides
MSPAALKNMEENKTTVMTTSHSSNDGGETVKGYSDAVEVRFSDFCKSGLALDENTCTQAIKLFKDTKHLLMTNVSSIGNGTSEEAERFWFAFVSYSVKRLSEKNRDDAQQKSDDPGLTLCQILRLAKLNIVDFFKELPHFIVKAGPILSNIYGADWENRLEAKELQANFVHLSILSRHYKRACRELFLTSDASSDKQPAISNEATHVSDHHRFGWLLFLALRVHAFSRFKDLVTCTNGLVSVLAVLIIHVPVCFRNFSFNDSQWFVRKGDKGVDLLASLCNKYDTSEEVLRKSMETTNNLIANILKKKPHSASEYKNENLVNINPDGLIYYEDLMEESSLQSSLNILEKDYDDAIRNKAELDERVFINEEDSLLGSGSVSAGSLNITGAKRKFDLISSPTKTITSPLSPHRSPASHANGIPGSANSKMAATPVSTAMTTAKWLRTIISPLPSKPSAQLERFLVSCDKDVTNDVIRRAQIILEAIFPSSSLGERCVTGSLQSTNLMDNIWAEQRRLEALKLYYRVLESMCTAEAQILHATNLTSLLTNERFHRCMLACSAELVVATYKTVTMLFPAVLERTGITAFDLSKVIESFIRHEESLPRELRRHLNSLEERLLDSMVWEKGSSLYNSLTVARTALSAEINRLGLLAEPMPSLDAIAMHINFSSGCLPPVPSLQKHETSPGSGQNGDLRSPKRPCTDFRSVLVERNSFTSPVKDRLLGNLKSKLPPPPLQSAFASPTRPNPGGGGETCAETGINVFFTKINKLAAVRINGMIEKLQPSQQHIRENVYRLFQLILSHQTSLFFNRHIDQIILCCFYGVAKISKLNLTFREIIYNYRRQPHCKTLVFRSVFVDWSSARHNGRTGQDHVDIITFYNEIFIPAAKPLLVDVGSAGTTVKASNVPEVGNNKDGQCPASPKVSPFPSLPDMSPKKVSSVHNVYVSPLRSSKMDALISNSSKSYYACVGESTHAYQSPSKDLNAINNRLNGNRKARGTLNLDNDVGLVSDSMVANSLGLQNGNCASTSGAALKSEQSDS

SEQ ID NO: 915 - protein, 402 aa, Chlorokybus atmophyticus
LLGDNKVRAISMSGTDGLMRGMEVLDTGAPLSVPVGEATLGRIFNVLGEPVDNLGPVANKSTLPIHRDPPAFTELDTKLSIFETGIKVVDLLAPYRRGGKIGLFGGAGVGKTVLIMELINNIAKAHGGVSVFGGVGERTREGNDLYQEMKESKVINEENLSESKVALVYGQMNEPPGARMRVGLTALTMAEYFRDVNNQDVLLFIDNIFRFVQAGSEVSALLGRMPSAVGYQPTLSREMGTLQERITSTKKGSITSIQAVYVPADDLTDPAPATTFAHLDATTVLSRGLAAKGIYPAVDPLDSTSTMLQPWIVGEEHYDTAQRVKQTLQRYKELQDIIAILGLDELSEEDRLTVARARKIERFLSQPFFVAEVFTGSPGKYVSLADTIKGFLMILSGELDSL

SEQ ID NO: 916 - protein, 91 aa, Saccharomyces kluyveri
ISQSLSKYSNSDAIIYVGCGERGNEMAEVLMEFPELFTEINGRKEPIMKRTTLVANTSNMPVAAREASIYTGITLAEYFRDQGKDVAMIAD

SEQ ID NO: 917 - protein, 496 aa, Oryza sativa
MAVMEEQQEGAAGVMRRRPKTKIVCTLGPASRSVEMIGRLLRAGMCVARFNFSHGSHEYHQETLDNLRAAMESTGILCAVMLDTKGPEIRTGFLKDGKPVQLKKGQEITVSTDYSIKGDDNMISMSYKKLAVDLKPGSVILCADGTITLTVLHCDKEQGLVRCRCENTAMLGERKNVNLPGVIVDLPTLTEKDKEDILKWGVPNKIDMIALSFVRKGSDLVEVRKVENQEGVANFDDILAQSDAFMVARGDLGMEIPIEKIFYAQKVMIFKCNIQGKPVVTATQMLESMIKSPRPTRAEATDVANAVLDGTDCVMLSGETAAGAYPELAVRTMAKICLQAESCVDHAAVFKSITASAPIPMSPLESLASSAVRTANSAKAALILVLTRGGTTARLVAKYRPSMPILSVVVPELKQTDSFDWTCSDEAPARHSLIVRGVIPMLSAATAKAFDNEATEEALGFAISNAKAMGLCNSGESVVALHRIGTASVIKLLTAN

SEQ ID NO: 918 - protein, 487 aa, Glycine max
MVEMDGVGSKYHQQTLNFSIDIHQQGISKCFDDDGRPKRTGTVWTASAHIITAVIGSGVLSLAWAIAQLGWIAGPIVMVLFSAITYYTSTLLADCYRTGDPVTGKRNYTYMDAIQSNFGGNGFKVKLCGLVQYINLFGVAIGYTIAASTSMMAIERSNCFHKSGGKDPCHINSNMYMISFGIVEILFSQIPGFDQLWWLSIVAAVMSFTYSTIGLGLGIGKVIENGGVGGSLTGITIGTVTQTDKVWRTMQALGDIAFAYSYSLILIEIQDTVKSPPSESKTMKKASFISVAVTSIFYMLCGCFGYAAFGDASPGNLLTGFGFYNPYWLLDIANAAIVIHLVGSYQVYCQPLFAFVEKHAAQMFPDSDFLNKEIEIPIPGFHPYRLNLFRLVWRTIYVMLSTVISMLLPFFNDIGGLLGAFGFWPLTVYFPVEMYIIQKRIPKWSTKWICLQILSMTCLLMTIGAAAGSIAGIAIDLRTYKPFKTNY

SEQ ID NO: 919 - protein, 456 aa, Pavonia multiflora
IGPVLDVAFPPGKMPNIYNALVVKGRDTAGQQINVTCEVQQLLGNNRVRAVAMSATDGLTRGMEVIDTGAALSVPVGGATLGRIFNVLGEPVDNLGPVDTRTTSPIHKPAPAFIQLDTKLSIFETGIKVVDLLAPYRRGGKIGLFGGAGVGKTVLIMELINNIAKAHGGVSVFGGVGERTREGNDLYMEMKESGVINEQNLAESKVALVYGQMNEPPGARMRVGLTALTMAEYFRDVNEQDVLLFIDNIFRFVQAGSEVSALLGRMPSAVGYQPTLSTEMGTLQERITSTKEGSITSIQAVYVPADDLTDPAPATTFAHLDATTVLSRGLAAKGIYPAVDPLDSTSTMLQPRIVGEEHYETAQRVKQTLQRYKELQDIIAILGLDELSEEDRLTVARARKIERFLSQPFFVAEVFTGSPGKYVGLAETIRGFKLILSGELDGLPEQAFYLVGNIDE

SEQ ID NO: 920 - protein, 474 aa, Microbispora rosea subsp. aerata
MSRRAKIVCTLGPATSSPERLRELIKAGMNVARFNLSHGSHELHKEVFDRVRAAADELGCAVGVLADLQGPKIRVGRFASGPVRLGYGDVFTITTEDVPGDRDIVSTTYEGLPGDVKPGDTILVDDGRLNLEVTAVDGPRVVTKVVIGGMISDNKGLNLPGVAVSAPALTEKDEEDLRWALRTGFDMIALSFVRCPDALVRAIMEEEGVRLPLLAKIEKPQAVERLEEIVDTFDGVMVARGDLGVELPLEQVPIVQRRIIDLCREKAHPVIVATQMLDSMMSSPRPTRAEASDVAYAVMDGADAVMLSGETSVGNYPVEAVSTMARIASPRRATRCRPPTPWTACPRPPAAHRPRGAEVGAIVGAKALVAYTMSGETARRLARYRSPIPLLAFTSNPLVRGQLALTWGVETFEVPFVHHTDDMVRQVEASLLSLGICEKGDKVVVVAGSPPGNHGSTNSLRVHTIGSAVAHPAV

SEQ ID NO: 921 - protein, 465 aa, Oceanobacillus iheyensis HTE831
MGMDYTPRQIVEQLDQFIVGQKQAKKSVAVALRNRYRRMKLDEGFRDEIVPKNILMIGPTGVGKTEIARRLAKLVGAPFIKVEATKFTEVGYVGRDVESMVRDLVEMAVRMVKEEKMAGVMNEAEEEANKRLVKLLVPESKKKPAMKNPFEMLFQSDGSDGDDETTEQDSHDEIRSKRKRIAHQLALGELEDHIVSVEIDEVPPSMFDMLQGSGMEQMGMNMQDAFGQFMPKKKKKRNLPVSEARKVLTQQEAQKLVDMDEVAQEATSRAEGSGIIFIDEIDKVAGKQENAANVSREGVQRDILPIVEGSTVVTKHGTVKTDHMLFVAAGAFHMSKPSDLIPELQGRFPIRVELEKLTVEDFKRILTEPSNALIKQYQLMLQTEGINVEFTDEAIERLAEIAYQVNQNTDNIGARRLHTILEKLLEDLSYEAPEITMEKVEITVGYVDDKLSSIVQDKDLSQFIL

SEQ ID NO: 922 - protein, 382 aa, Fusobacterium nucleatum subsp. nucleatum ATCC 25586
MITGQRIIDTFFAVTKGGTAAIPGPFGSGKTVIQHQLAKWADAEVVVYVGCGERGNEMTDVLMEFPEIIDPKTGQSLMKRTVLIANTSNMPVAAREASIYTGITIAEYFRDMGYSVALMADSTSRWAEALREMSGRLEEMPGDEGYPAYLASRIAEFYERAGLVECLGNGEEGALTVIGAVSPPGGDISEPVSQSTLRIAKVFWGLDYALSYRRHFPAINWLNSYSLYQAKMDKYKEEEIDTDFPKFRIEAMALLQEEAKLQEIVRLVGRDSLSELDQLKLEITKSLREDFLQQNAFHEVDTYCSLTKQFKMLKLILSFYDEAQRGIKEGVYLDEILALPAREKITRAKNISEKELDSFDKIEEEIKEVISKLIAEGGKPNA

SEQ ID NO: 923 - protein, 621 aa, Triticum aestivum
MAHGDRMTTFEEGERESEYGYVRKVSGPVVVADGMGGAAMYELVRVGHDSLIGEIIRLEGDSATIQVYEETAGLTVNDPVLRTKKPLSCELGPGILGNIFDGIQRPLKTIAIKSGDVYIPRGVSVPALDKDQQWEFQPNKLGVGDNITNGDLYATVFENTLMKHHIALPPGAMGKISYIAPAGQYSLQDTVLELEFQGIKKEFTMLHTWPVRTPRPVASKLAADTPLLTGQRVLDALFPSVLGGTCAIPGAFGCGKTVISQALSKYSNSDTVVYVGCGERGNEMAEVLMDFPQLTMTLPDGREESVMKRTTLVANTSNMPVAAREASIYTGITIAEYFRDMGYNVSMMADSTSRWAEALREISGRLAEMPADSGYPAYLASRLASFYERAGKVQCLGSPDRTGSVTIVGAVSPPGGDFSDPVTSATLSIVQVFWGLDKKLAQRKHFPSVNWLISYSKYSTALEGYYEKFDPGFIDMRTKAREVLQREDDLNEIVQLVGKDALGESDKITLETAKLLREDYLAQNAFTPYDKYCPFYKSVWMMRNIIHFNTLANQAVERAANADGHKITYAVVKSRMGDLFYRLVSQKFEDPAEGEDVLIAKFQKLYDDLTTGFRNLEDEAR

SEQ ID NO: 924 - protein, 246 aa, Glycine max
  unsure (1)..(246): unsure at all Xaa locations
MEFPTEAILSEGSISQKKPXGGKLEIRRIENTTNRQVTFCKRRNGLLKKAYELSVLCDAEVALVVFSSRGRLYEYANNSVRGTIERYKKACAASTNAESVSEANTQFYQQEASKLKRQIRDIQNLNRHILGEGLSSLSLKELKNLESRLEKGLSRVRSRKHETLFADIEFMQKREIELQNHNNFLRAKIAENERAQQRQQDMIPGTECESTIPNSQSYDRNFFPVNLIDSNNNQYSRQDQTALQLV

SEQ ID NO: 925 - protein, 474 aa, Pittosporum fairchildii
  unsure (1)..(474): unsure at all Xaa locations
GXGVSTXEKKNXGSXXQIIVPVLDVAFSTGKMANIYNALVVKGQDTVGQPINVACEVQQLLGNNRVRAVAMSATDGLTRGMEVVDTGAPLSVPVGGTTLGRIFNVLGEPVDNLGPVDTRTTSPIHRSAPAFIQLETKLSIFETGIKVVDLLAPYRRGGKIGLFGGAGVGKTVLIMELINNIAKAHGGVSVFGGVGERTREGNDLYMEMKESGVINEQNIEESKVALVYGQMNEPPGARMRVGLTALTMAEYFRDVNEQDVLLFIDNIFRFVQAGSEVSALLGRMPSAVGYQPTLSTEMGTLQERITSTKEGSITSIQAVYVPADDLTDPAPATTFAHLDATTVLSRGLAAKGIYPAVDPLDSTSTMLQPRIVGEEHYETAQRVKQTLQRYKELQDIIAILGLDELSEEDRLTVARARKIERFLSQPFFVAEVFTGSPGKYVGLAETIRGFQLILSGELDGLPEQAFYLVGNIDE

SEQ ID NO: 926 - protein, 486 aa, Helwingia japonica
GSGVSTLEKKNLGRFAQIIGPVLDVAFPPGKMPNIYNALVVKGRDTAGQPINVTCEVQQLLGNNRVRAVAMSATDGLMRGMEVIDTGAPLSVPVGGATLGRIFNVLGEPVDNLGPVDTRTTSPIHRSAPAFIQLDTKLSIFETGIKVVDLLAPYRRGGKIGLFGGAGVGKTVLIMELINNIAKAHGGVSVFGGVGERTREGNDLYMEMKESGVINEQNIAESKVALVYGQMNEPPGARMRVGLTALTMAEYFRDVNEQDVLLFIDNIFRFVQAGSEVSALLGRMPSAVGYQPTLSTEMGSLQERITSTKEGSITSIQAVYVPADDLTDPAPATTFAHLDATTVLSRGLAAKGIYPAVDPLDSTSTMLQPRIVGEEHYETAQKVKETLQRYKELQDIIAILGLDELSEEDRLTVSRARKIERFLSQPFFVAEVFTGSPGKYVGLAETIRGFQLILSGELDGLPEQAFYLVGNIDEATAKAMNLEMES

SEQ ID NO: 927 - protein, 97 aa, Staphylococcus aureus
DIVSHAEGFIYTVTMNATTGQNGAFHPELKRKIESIKAIANVPVVAGFGIRTPQHVADIKEVADGIVIGSEIVKRFKSNTREEIIKYLQSIQQTLNN

SEQ ID NO: 928 - protein, 331 aa, Magnetospirillum magnetotacticum
MHPPGRHHPGAGIQPRHRLCLQDRPHPAQGSPDGDQSVGTRRQGCQHHRQGAGRRASGGVSLMSRLEQRFAKLKAENRAALVTFITAGDPDRATSQALLDGMPAAGADIIELGMPFTDPMADGPVIELAAGRALKAGGSLKQTLEMVEVFRKTDSETPIILMGYYNPVYAWGAEKFSADAARAGVDGLIIVDLPPEEADELVPHLRRSGIDFIVLTTPTSDDARLPVVLSNASGFVYYVSIAGITGTASAAQSAIDDAVARIRRHTDLPVCVGFGIKAPAQAAQVARVADGAVVGSAIVSVLADNIGKPSAVSAPLALAKDLAEGVRGARK

SEQ ID NO: 929 - protein, 718 aa, Oryza sativa
MVGIDLNTVEEEEDEEEGGATGTVTAPAEARAGGAVCLELWHACAGPVAPLPRKGSAVVYLPQGHLEHLGAAPGSGPGAAVPPHVFCRVVDVSLHADAATDEVYAQVSLVADNEEVERRMREGEDGAACDGEGEDAVKRPARIPHMFCKTLTASDTSTHGGFSVPRRAAEDCFPPLDYSLQRPFQELVAKDLHGTEWRFRHIYRGQPRRHLLTTGWSGFINKKKLVSGDAVLFLRGEDGELRLGVRRAAQLKNASPFPALHNQISNTSSLSEVAHAVAVKSIFHIYYNPRLSQSEFIIPYWKFMRSFSQPFSVGMRFKLRYESEDASERRRTGIIIGSREADPMWHGSKWKCLVVKWDDDVECRRPNGVSPWEIELSGSVSGSHLSTPHSKRLKSCFPQVNPDIVLPNGSVSSDFAESARFHKVLQGQELLGLKTRDGTVNTASQATEARNFQYTDERSCSINMSNNILGVPRLGVKTPSGNPGFSYHCSGFGESQRFQEVLQGQEVFRPYRGGTLSDACIRGSGFRQPDGNHAPGAAFKWLAPQGCDHHGITTSVLPQASSPSSVLMFPQTSSKMPGLEYIYGCLDRNENSRHFKIGPTQDMTRTDQTLRLWPHLISGKVLDECTRNEKLHSPVSGAEHESNNKCLNTNGCKIFGISLTEKAQAGDEVDCGNASYHSRLQSLKPQMPKSLGSSCATVHEQRPVVGRVVDISAVNTMI

SEQ ID NO: 930 - protein, 136 aa, Oryza sativa
  unsure (1)..(136): unsure at all Xaa locations
XHVALPPGSMGKISYIAPAGQYSLQDTVLELEFQGIKKQFTMLQTWPVRSPRPVSSKLAADTPLLTGQRVLDALFPSVLGGTCAIPGAFGCGKTVISQALSKYSNSEAAVYVVCGARGYLIAEVLXSTSIDITFLX

SEQ ID NO: 931 - protein, 479 aa, Sarcolaena sp. Chase 903
  unsure (1)..(479): unsure at all Xaa locations
VXTLEKENRGRISQIIGPVLDVTFPPGKMPNIYNALVVKGQDTLGQQINVTCEVQQLLGNNRVRAVAMSATDGLMRGMEVINTGTPLSVPVGGVTLGRIFNVLGEPIDELGPVDTXTTSPIHKPAPAFIQLETKLSIFETGIKVVDLLAPYRRGGKIGLFGGAGVGKTVLIMELINNIAKAHGGVSVFAGVGERTREGNDLYMEMKESGVINEQNLAESKVALVYGQMNEPPGARMRVGLTALTMAEYFRDVNKQDVLLFIDNIFRFVQAGSEVSALLGRIPSAVGYQPTLSTEMGSLQERITSTKKGSITSIQAVYVPADDLTDPAPATTFAHLDATTVLSRGLAAKGIYPAVDPLDSTSTMLQXRIVGAEHYETAQRVKQTLQRYKELQDIIAVLGLDELSEEDRLTVARAXKIERFLSQPFFVAEVFTGSPGKYVGLAETIRGFKLILSGELDSLPGQAXYLVGNIDEATEKGTKL

SEQ ID NO: 932 - protein, 577 aa, Arabidopsis thaliana
MTSVLGMMNPNLINGRNLHKGSSIFVQDKETKKRVQWRLSIKEGSLRTHQATASSATEPKATEFNTTTYEDKMLTNYVPVYVMLQLGVITNDNVLENEESLKKQLKKLKQSQVDGVMVDVWWGIVESKGPKQYQWSAYRNLFAIVQSFGLKLQAIMSFHRCGGNIGDDVNIPIPKWVLEIGDSNPDIFYTNKSGNRNKECLSLSVDNLSLFRGRTAVEMYRDYMKSFRENMEDFISSGVIIDIEVGLGPAGELRYPSYSETQGWVFPGIGEFQCYDKYLRSDYEEEVRRIGHPEWKLPENAGEYNSVPGETEFFEYSNGTYLKEEGNFFLSWYSKKLLLHGDQILDEANKVFLGCKLKIAAKVSGIHWWYKTESHAAELTAGYYNLKNRDGYRAIAKIMRRHHAILNFTCLEMKNTEQPAKAKSGPQELVQQVLSSGWREGIEVAGENALPRFDRNGYNQIILNARPNGVNQDGKPRMFGFTYLRLSDKLLNEPNFSTFKMFLKRMHANQEYCSEPERYNHELLPLERSRNDESLEMFMEETEPFDPFPWLDETDMSIRPFESVLSLLRSTFLRKKS

SEQ ID NO: 933 - protein, 996 aa, Oryza longistaminata
MISLPLLLFVLLFSALLLCPSSSDDDGDAAGDELALLSFKSSLLYQGGQSLASWNTSGHGQHCTWVGVVCGRRHPHRVVKLRLRSSNLTGIISPSLGNLSFLRTLQLSNNHLSGKIPQELSRLSRLQQLVLNFNSLSGEIPAALGNLTSLSVLELTNNTLSGSIPSSLGKLTGLYNLALAENMLSGSIPTSFGQLRRLSFLSLAFNHLSGAIPDPIWNISSLTIFEVVSNNLTGTLPANAFSNLPNLQQVFMYYNHFHGPIPASIGNASSISIFTIGLNSFSGVVPPEIGRMRNLQRLELPETLLEAEETNDWKFMTALTNCSNLQEVELAGCKFGGVLPDSVSNLSSSLVSLSIRDNKISGSLPRDIGNLVNLQYLSLANNSLTGSLPSSFSKLKNLRRLTVDNNRLIGSLPLTIGNLTQLTNMEVQFNAFGGTIPSTLGNLTKLFQINLGHNNFIGQIPIEIFSIPALSEILDVSHNNLEGSIPKEIGKLKNIVEFHADSNKLSGEIPSTIGECQLLQHLFLQNNFLNGSIPIALTQLKGLDTLDLSGNNLSGQIPMSLGDMTLLHSLNLSFNSFHGEVPTNGVFANASEIYIQGNAHICGGIPELHLPTCSLKSRKKRKHQILLLVVVICLVSTLAVFSLLYMLLTCHKRRKKEVPATTSMQGHPMITYKQLVKATDGFSSSHLLGSGSFGSVYKGEFDSQDGEITSLVAVKVLKLETPKALKSFTAECETLRNTRHRNLVKIVTICSSIDNRGNDFKAIVYDFMPNGSLEDWLHPETNDQAEQRHLTLHQRVTILLDVACALEHLHFHGPEPIVHCDIKSSNVLLDADMVAHVGDFGLARILVEGSSLMQQSTSSMGIRGTIGYAAPEYGVGNTASTHGDIYSYGILVLETVTGMRPADSTFRTGLSLRQYVEPGLHGRLMDVVDRKLGLDSEKWLQARDVSPRSSITECLVSLLRLGLSCSQELPSSRTQAGDVINELRAIKESLSMSSDM

SEQ ID NO: 934 - protein, 247 aa, Oryza sativa (japonica cultivar-group)
MGRGKIEIKRIENTTNRQVTFCKRRNGLLKKAYELSVLCDAEVALIVFSSRGRLYEYANNSVKSTVERYKKANSDTSNSGTVAEVNAQHYQQESSKLRQQISSLQNANSRTIVGDSINTMSLRDLKQVENRLEKGIAKIRARKNELLYAEVEYMQKREVELQNDNMYLRSKVVENERGQQPLNMMGAASTSEYDHMVNNPYDSRNFLQVNIMQQPQHYAHQLQPTTLQLGSRPSISFGVDTVRTHVR

SEQ ID NO: 935 - protein, 842 aa, Oryza sativa
MTKLLHSACLLICISGAIGLAAAAAGHPGCQTRCGDVDIPFPFGIGDHCAIHEGFRLECDNATKGTSNQKPFWGDFEVIKISMEDGKVWVKAYMSRQCYDQSTGACDNKVNKLTPKNGSCSGAGCCQANVPKSIQYYQGYFNEGYNTTKIWMSSPCSYMAVMETAAFNFSTSYLTSSVFYDTYKGGVPVVYDWAITSKTCTESRRNKTSYACISNNSQCIDNLTNAQGYRCKCSNGYEGNPYIKDGCKDIDECLNNATYPCKGICTNTLGNFTCSCSPGSYMMNGDCMPKKKLRFDSVPVEATNRFNEQQILGQGGHGTVYKGLLKGNMEVAVKRCMTINEHQKKEFGKEMLILSQINHKNIVKLLGCCLEVEVPMLVYEFIPNGTLFDLIHGNHGQQISLATRLQIAHESAEALTYLHSCASPPILHGDIKSSNILLDRNLIAKVSDFGASILAPTDESQFVTLVQGTCGYLDPEYMQLCLLTDKSDVYSFGVVLVELLTCQKAFNLNAPEHEKSLSMRFLNAMKNNKLADILDDQIKNSENMPFLEEIAELAAQCLEMSGVNRPSMKHIADNLDRLRKVMQHPWAEQNSEELESLLGESSMVSSRLSVATFQFQLFQGFSPVLQAGFSVVKGYHEGFPCTHHRFLRLLRHRRALGFVLQDVLAPLLEVAALRSGPFIWPAPDTVAFLTPGDGADRGGGGAKGGGERFMGFRSDGDRKAMRAAGREAEVVDGGTVLLTPGDDVDFKLHTCCHHRSLVHTGMTLVVHRAGTVVCALDLNIVVSEMTQQQPLRAQHVWDVGKRKGPAATLHRNRCSSSVPHYHLVKLRSSSIAGLSTSGAPRG

SEQ ID NO: 936 - protein, 507 aa, Pseudomonas aeruginosa UCBPP-PA14
MTPQSPPSLAGGSLHASVIQGVLCMSVRRTKIVATLGPASNSPEVLEQLILAGIDVARLNFSHGTPDEHRARARLVRELAAKHGRFVALLGDLQGPKIRIAKFANKRIELQVGDKFRFSTSHARDAGTQEVVGIDYPDLVKDCGVGDELLLDDGRVVMVVEEVAADELRCRVLIGGPLSDHKGINRRGGGLTAPALTDKDKADIKLAADMDLDYVAVSFPRDAKDMEYARRLLTEAGGKAWLVAKIERAEAVADDDALDGLIRASDAVMVARGDLGVEIGDAELVGIQKKIILHARRNNKVVITATQMMESMIHSPMPTRAEVSDVANAVLDYTDAVMLSAESAAGEYPVEAVQAMARVCQGAEKHPTSQKSSHRLGQTFDRCDESIALASMYTANHFPGIKAIICLTESGFTPLIMSRIRSSVPIYAYSPHRETQARVAMFRGVETIPFDPAALPAEKVSQAAVDELLKRGVVTKGDWVILTKGDSYTAQGGTNTMKVLHVGDLLV

SEQ ID NO: 937 - protein, 498 aa, Populus tomentosa
MRINPTTSGPGVSALEKKNLGHIAQIIGPVLDVVFPPGKMPNIYNALVVKGRDTVSQQINVTCEVQQLLGNNRVRAVAMSATEGLMRGMEVIDTGAPLSVPVGGATLGRIFNVLGEPVDDLGPVDTGTTSPIHRSAPAFIQLDTKLSIFETGIKVVDLLAPYRRGGKIGLFGGAGVGKTVLIMELINNIAKAHGGVSVFGGVGERTREGNDLYMEMKESGVINEENIAESKVALVYGQMNEPPGARMSVGLTALTMAEYFRDVNEQDVLLFIDNIFRFVQAGSEVSALLGRMPSAVGYQPTLSTEMGTLQERITSTKEGSITSIQAVYVPADDLTDPAPATTFAHLDATTVLSRGLAAKGIYPAVDPLDSTSTMLQPQIVGEEHYETAQRVKQTLQRYKELQDIIAILGLDELSEEDRLTVARARKIERFLSQPFFVAEVFTGSPGKYVGLAETIRGFKLILSGELDSLPEQAFYLVGNIDEATAKATNLEMENNLKK

SEQ ID NO: 938 - protein, 183 aa, Allium cepa
MLQTWPVRTPRPVASKLAADTPLLTGQRVLDALFPSVLGGTCAIPGAFGCGKTVISQALSKYSNSDTVVYVGCGERGNEMAEVLMDFPQLTMTLPDGREESVMKRTTLVANTSNMPVAAREASIYTGITIAEYFRDMGYNVSMMADSTSRWAEALREISGRLAEMPADSGYPAYLAARLASFY

SEQ ID NO: 939 - protein, 269 aa, Pseudomonas putida
MSRLEQRFAELKAEGRSALVTFVTAGDPGYDASLQILKGLPAAGADVIELGMPFTDPMADGVAIQLATLRALEAGQTLAKTLQMVREFRVDNHTTPIVLMGYYNPIHRFGVEKFVAEAKQAGVDGLIIVDLPPEHDAELATPAQAAGIDFIRLTTPTTDDARLPRVLERSSGFVYYVSVAGVTGAGSATTEHVTEAIARLRRHTDLPISVGFGIRTPEQAANIARLADGVVVGSALVDKIAQATSADQAVNDVLSLCSALAEGVRGARR

SEQ ID NO: 940 - protein, 157 aa, Triticum aestivum
MVTVRERLTQALAYIEEMQRDKHVLLQVWVPTMSYGQLVLTTRGMPFTLNKSSERLVQFRDVSTRYQLSADVASKGSPVGLPGRVFIGKLPEWSPDVRYFTSYEYPMVAHAQYLDVHGTMGLPVFEKGNPSCLGVIELIMTRQKLNFTSEINNICSA

SEQ ID NO: 941 - protein, 505 aa, Saccharomyces unisporus
ISQSLSKYSNSDTIIYVGCFEKGTEVLMADGTDKVIEDITIGEQVMGKDGQPREVVGLPRGKMTMYQVCHKATEQNEIALMDYVCSGNHKFVLVTPQNVKITEHMLRGKMYTSVNYFVANDFENGQVVKLRTKTFQHDIHGGADGAKVEAQKFASTIDLSPISWEIEASKYVELDVNVRNATTQLINPVFYESGKLASRLQTKNIDQTSADKLAYVMGSWVGAGSMDQPTFAGNQLDEEFVSRLTEYGSGLDLTKNNSVWDIINESGLRTLNANGEATKTIPKELVSDSISVREHFIAGLVDTQGNVKRASTGAVETASISTVYERISNDLVKLARSLGIKASVSQQEEHVDAKGVDQQQTYNIKLTGSALNGVVRLSALSKNRDEPVSFERLPVPFHFTLLEKAEDNYYGVTLPDATDKQYLLSSLALVHNCGERGNEMAEVLMEFPELFTEINGRKEPIMIRTTLVANTSNMPVAAREASIYTGITLAEYFRDQGKDVSMIAD

SEQ ID NO: 942 - protein, 284 aa, Methanocaldococcus jannaschii
MEWMIMKLAEKFEELKNKGEKAFVAFYVGGDPNLEISEKALEVICKHADIVEIGIPFSDPVADGITIQKADVRALNSGMNPLKAFELAKKLNEKAPNVPKVFLTYYNIIFKMGEEEFVKKCKEAGVSGIIVPDLPIEEADSLYNYCKKYGVDLIFLVAPTTPDERLKKILEKCSGFVYVVSVTGITGAREKVAEETKELIKRVKKFSKIPACVGFGISKREHVEEITEIADGAIVGSAIVKIVEKHLDENGQIKDEEKFLKELEEFVKNLKEGTKKKAKVAIKN

SEQ ID NO: 943 - protein, 332 aa, Arabidopsis thaliana
MSNVIGDRTEDGLSTAAAASGSTAVQSSPPTDRPVRVYADGIYDLFHFGHARSLEQAKLAFPNNTYLLVGCCNDETTHKYKGRTVMTAEERYESLRHCKWVDEVIPDAPWVVNQEFLDKHQIDYVAHDSLPYADSSGAGKDVYEFVKKVGRFKETQRTEGISTSDIIMRIVKDYNQYVMRNLDRGYSREDLGVSFVKEKRLRVNMRLKKLQERVKEQQERVGEKIQTVKMLRNEWVENADRWVAGFLEIFEEGCHKMGTAIVDSIQERLMRQKSAERLENGQDDDTDDQFYEEYFDHDMGSDDDEDEKFYDEEEVKEEETEKTVMTDAKDNK

SEQ ID NO: 944 - protein, 246 aa, Arabidopsis thaliana
MEGGASNEVAESSKKIGRGKIEIKRIENTTNRQVTFCKRRNGLLKKAYELSVLCDAEVALVIFSTRGRLYEYANNSVRGTIERYKKACSDAVNPPTITEANTQYYQQEASKLRRQIRDIQNLNRHILGESLGSLNFKELKNLESRLEKGISRVRSKKHEMLVAEIEYMQKREIELQNDNMYLRSKITERTGLQQQESSVIHQGTVYESGVTSSHQSGQYNRNYIAVNLLEPNQNSSNQDQPPLQLV

SEQ ID NO: 945 - protein, 246 aa, Antirrhinum majus
MASLSDQSTEVSPERKIGRGKIEIKRIENKTNQQVTFCKRRNGLLKKAYELSVLCDAEVALVVFSSRGRLYEYANNSVKATIDRYKKASSDSSLNGSISEANTQYYQQEASKLRAQISNLQNQNRNMLGESLGALSLRELKNLESRVERGISRIRSKKNELLFAEIEYMQKRQEIDLHHNNQYLRAKIAESERVQGQHMNLMPGGSSGYEQLVETQPFDARNYLQVNGLQPNNDYPRQDQLPLQLV

SEQ ID NO: 946 - protein, 488 aa, Apeiba tibourbou
  unsure (1)..(488): unsure at all Xaa locations
SXIXTLXKRNLGRISQIIGPVLDVAFPPGKMPNIYNALVVKGRDTVGQQINVTCEVQQLLGNNRVRTVAMSATDGLTRGMEVIDTGAPLSVPVGGATLGRIFNVLGEPVDNLGPVDTRTTSPIHKPAPAFIQLDTKLSIFETGIKVVDLLAPYRRGGKIGLFGGAGVGKTVLIMELINNIAKAHGGVSVFGGVGERTREGNDLYMEMKESGVINEQNLAESKVALVYGQMNEPPGARMRVGLTALTMAEYFRDVNEQDVLLFIDNIFRFVQAGSEVSALLGRMPSAVGYQPTLSTEMGTLQERITSTKEGSITSIQAVYVPADDLTDPAPATTFAHLDATTVLSRGLAAKGIYPAVDPLDSTSTMLQPRIVGEEHYETAQRVKQTLQRYKELQDIIAILGLDELSEEDRLTVARARKIERFLSQPFFVAEVFTGSPGKYVGLAETIRGFKLILSGELDGLPEQAFYLVGNIDEATAKATNLEMESXXK

SEQ ID NO: 947 - protein, 423 aa, Yersinia pestis CO92
MTDKRKDGSGKLLYCSFCGKSQHEVRKLIAGPSVYICDECVDLCNDIIREEIKEVSPHRDRSSLPTPHEIRHHLDDYVIGQEPAKKVLAVAVYNHYKRLRNGDTSNGIELGKSNILLIGPTGSGKTLLAETLARLLDVPFTMADATTLTEAGYVGEDVENIIQKLLQKCDYDVQKAQRGIVYIDEIDKISRKSDNPSITRDVSGEGVQQALLKLIEGTIAAVPPQGGRKHPQQEFLQVDTSKILFICGGAFAGLDKVIGQRINTGSGIGFGAVVKGQSEKATEGELLSQVEPEDLIKFGLIPEFIGRLPVVATLSELSEDALIQILKEPKNALTKQYQALFSLEGVELEFRDEALTAIAKKAMARKTGARGLRSIVEGALLDTMYDLPSMDSVEKVVVDESVIAGQSAPMLIYGQPEAQASGE

SEQ ID NO: 948 - protein, 324 aa, Oryza sativa (japonica cultivar-group)
MAFTVKASSPSSPAASSSSSSAPAKLGAAPGRVAVRKLTAAATSLRLDRAPAAPATERGLSSVSRTMSRLMEKGKTAFIPYITAGDPDMGTTAEALRLLDACGADVIELGVPFSDPYNDGPVIQASAARALSAGATMDGIMSMLAEVTPELSCPVVLFSYLGPIVRRGPANFTAAAKEAGVQGLIVPDLPYLEACSFRSEVIKNNLELVLLTTPTTPPDRMKAITAASGGFVYLVSVNGVTGSRQDVNPRVEHLLQEIKQVTDKAVCVGYGISTPDHVRQIAEWGADGVIIGSAMVRQLGEAASPKQGLKRLEKYARSLKNALP

SEQ ID NO: 949 - protein, 487 aa, Polygonum sachalinense
  unsure (1)..(487): unsure at all Xaa locations
XGVXTLXXKNXGRVXXXIGPVLDVTFPPGKMPNIYNALVVKGRDTAGQPINVTCEVQQLLGNNRVRAVAMSATDGLTRGMEVVDTGAPLSVPVGGATLGRIFNVLGEPVDNLGPVDTRTTSPIHRSAPAFIQLDTKLSIFETGIKVVDLLAPYRRGGKIGLFGGAGVGKTVLIMELINNIAKAHGGVSVFGGVGERTREGNDLYMEMKESGVINEQNIPESKVALVYGQMNEPPGARMRVGLTALTMAEYFRDVNKQDVLLFIDNIFRFVQAGSEVSALLGRMPSAVGYQPTLSTEMGSLQERITSTKQGSITSIQAVYVPADDLTDPAPATTFAHLDATTVLSRALAAKGIYPAVDPLDSTSTMLQPRIVGEEHYKIAQRVKQTLQRYKELQDIIAILGLDELSEEDRLTVARARKIERFLSQPFFVAEVFTGSPGKYVGLAETIRGFQLILSGEFDGLPEQAFYLVGXIDXATXXAMXXXMEXXL

SEQ ID NO: 950 - protein, 541 aa, Zygosaccharomyces rouxii
ISQSLSKFSNSDAIVYVGCFAKGTEVMMSDGSIKEVEGIEVGQEVMGKDGKPREVVGTPSGREKMYKVSHKTAHRAHKSDSTSERFGLFEYTCNATHKLVVRTSRSCRPLVRNIQGTDYVEVCLFNMTKKTLEDGRVIDIVEETSDFYPAVEGPEKALRILKEYAEADGGKEYFEWTIEARDVALLSAQVRKATYQLSAPVLLENNHFSHYLKDSNSAVGNDTVRALSYFLGLWIGDGMLNNAATFSVDSQNASLLNRINEFAEVLGLSAEYKDSQEPKRAKTVNLYAKAIRDEGVRKNLDTHNLLWDAIVDLGYLKDDSKNVPGYICSDSFQHREVFLAGIIDSTGYVSDETATVKTIDQSVMTGTVAVARSLGINVSVDVEVDEDGVDRSFVYAIYMDRSDALLAVLANCASNNKQIEAPPHGVIREFNKAYFEMEELEEDEYYGLTLSNESDHQFLLANQLVVHNCGERGNEMAEVLMEFPELFTEVNGHKEPIMKRTTLVANTSNMPVAAREASIYTGITLAEYFRDQGKNISMIAD

SEQ ID NO: 951 - protein, 242 aa, Shigella sonnei
LKERKEGAFVPFVTLGDPGIEQSLKIIDTLIEAGADALELGIPFSDPLADGPTIQNATLRAFAAGVTPAQCFEMLALIRQKHPTIPIGLLMYANLVFNKGIDEFYAQCEKVGVDSVLVADVPIEESAPFRQAALRHNVAPIFICPPNADDDLLRQIASYGRGYTYLLSRAGVTGAENRAALPLNHLVAKLKEYNAAPSLQGFGISTPDQVKAAIDAGAAGAISGSAIVKIIEQHINEPEKML

SEQ ID NO: 952 - protein, 272 aa, Nostoc punctiforme
MTAISDCFETLGHNHECALIPFITAGDPDLETTAKALQVLDQSGADIIELGIPYSDPLADGPVIQAAATRALQRGTKLEHVLEMLQGITPKLRSPIVLFTYYNPILHRGIDKFLQEIAAAGVAGLVVPDLPLEEAAGLLEPAKEMGIDVILLVAPTSDAKRIEAIAHSSQGFIYLVSVTGVTGVRSQLESRVSDLLKQIRGVTEKPIGVGFGISDAAQARQVKEWGADAAIVGSAVVKRLAEGTPEQGLSAIAQLCQSLKAAIKTSTNTPLD

SEQ ID NO: 953 - protein, 1290 aa, Streptomyces avermitilis MA-4680
MGTRHSTAGTSTRGVRVDVRHDTGSGDDAAPTDGTPLPAPRRPVRRPAAARTTFHRDRRTVRKRLWAASGAGVGAVVCWVSADAVHAVRAPVPVVAECVLGGAVLAVVCVRLLLTSLWPVALTVDIDGIEWHGPLRRLRWSWPELDWLCVVPAVDRRILRTGHRFPEQLLLRTTPPATAPATAPTTPPTPSPLTAPATAPGPRRRITGPAGLLLRTVELTPRWDAGWRCVSVDLRPLAVEPRELDLALDTHAGPRWRRTGLPPATTSAVATGSEYRIPGRLRSPLTRRAAGYGGRLSVAVWLACCYGYLRFAATRPGPGLHWAYLGAGLAAPAVVLPALLALDHLLARRCALHLDAGGLRLHAGGTDRALPWSAVESLEIGSAPEGARGRQHRWALLARPLVPEPGAAPPRDCFRAAPDGTLRIVPVLAGVPGEALGLAVHPGQLAHALHTFGVRVAGPARDGDGAQRWSAPALDAAVPPADPPSAPPSGTRSAAPGELRVLRVSPTGDSGHRTIAAALRAHTGPGPLRVMVEPGRYPEPLSLKGEVELCAARGPGTVVVEPAVAGANVLDVTGSAVVTGLAVVGRGTATVAVFGRLLLRDCRLEGRDGAAALTASAGSEITVMGGELAVGKATLQGARAVLRGTRFQAAGEDALVVSQGAHAEVTDCVFADGRGSAVHVSGAGTRARLRTCEFSGFGGHGVLVEQQAEAEVRDCLLRDLSGTALGFRDQGHGTVVGTRVRGADAGAVVSGGADPTLRDCSFHGCRAVGVRVTEEAVCGIEDCSFEHLSNAALSVDQKARLRVNGCRIVDARHGVVVEKGHASLERVEARALTGSVVRLCQDGTFEAAELRADDCKYGLHASGSGSSGELTGAELCGMRDCALVLTGSARVVARNLRISEPVSDGLFARDTSYLTVRQCTVERAARYGAHILDSAVLVADQLTVTDSGAHGILAENSSQFDIRDSSCTGSDGDGLRTRSDVSGRITDSRITGSRGEAVAGDGSVRLDAVTTRDAPPPAGQPAAGLGPQAELDALIGLTEAKRQVRTQVDLLRLARLRRDAGLSEPPGGRHLVFSGPPGTGKTTVARLYGRILAELGVLSDGRLVEVHRSDLVGQYLGSTALKTRAVFDSARGGVLFIDEAYSLARRFGVNHDLGQEAIDELTKLMEDHREDVVVIAAGYPVEMEGFLEANPGLASRFSRIVTFSPYSPGELVRIVRHLADRHGFELDPDVEPRLLARFRGRASTGSPSNGRDARTLFETMIEHMAGRLSDIDRPTHQELLTLRPDDIPEP

SEQ ID NO: 954 - protein, 383 aa, Irvingbaileya sp. Plunkett 1510
EPVDNLGPVDTRTTSPIHKSAPAFIQLDTKLSIFETGIKVVDLLAPYRRGGKIGLFGGAGVGKTVLIMELINNIAKAHGGVSVFGGVGERTREGNDLYMEMKESGVINEQNIAESKVALVYGQMNEPPGARMRVGLTALTMAEYFRDVNEQDVLLFIDNIFRFVQAGSEVSALLGRMPSAVGYQPTLSTEMGSLQERITSTKEGSITSIQAVYVPADDLTDPAPATTFAHLDATTVLSRGLAAKGIYPAVDPLDSTSTMLQPRIVGEEHYETAQRVKQTLQRYKELQDIIAILGLDELSEEDRLTVARARKIERFLSQPFFVAEVFTGSPGKYVGLAETIRGFQLILSGELDGLPEQAFYLVGNIDEAAAKAINLEMESNLKK

SEQ ID NO: 955 - protein, 492 aa, Marchantia polymorpha
MKTNFLAFGMSTLVAKNIGSITQVIGPVLDVAFSPGKMPNIYNSLIVKDQNSAGEEINVTCEVQQLLGNNKVRAVAMSATDGMMRGMKVIDTGAPLTVPVGEATLGRIFNVLGEPVDNLGPVEVTTTFPIHRAAPAFTQLDTKLSIFETGIKVVDLLAPYRRGGKIGLFGGAGVGKTVLIMELINNILKAHGGVSVFGGVGERTREGNDLYMEMKESKVINEQNISESKVALVYGQMNEPPGARMRVGLTALTMAEYFRDVNKQDVLLFIDNIFRFVQAGSEVSALLGRMPSAVGYQPTLSTEMGTLQERITSTKEGSITSIQAVYVPADDLTDPAPATTFAHLDATTVLSRGLAAKGIYPAVDPLDSTSTMLQPWIVGEEHYETAQGVKQTLQRYKELQDIIAILGLDELSEEDRLTVARARKIERFLSQPFFVAEVFTGSPGKYVSLRETIKGFQMILSGELDSLPEQAFYLVGNIDEATAKAATLQVES

SEQ ID NO: 956 - protein, 171 aa, Pringlea antiscorbutica
KLWPNAKYVSSIMTGSMLPYLKKLRHYAGGLPLVSADYGSTESWIGVNVDPHFPPEDVSFAVIPTFSYFEFIPLYRQQNQQDICSDGDFVEEKPVPLSQVKLGQEYELVLTTFTGLYRYRLGDVVEVTGFHKGTPKLSFIYRRKLILTINIDKNTEKDLQRVVDKASQLLS

SEQ ID NO: 957 - protein, 547 aa, Zygosaccharomyces bailii
  unsure (1)..(547): unsure at all Xaa locations
ISQSLSKYSNSDAIIYVGCFAKGTEVMMHDGSVKAIETIEAGEAVMGTDGQPRKVVGLPRGREVMYKVSQKTAHRVHKTDETRAAPVALFEYNCNATHKLVVRTPRSCRSITRKMQGVDYNEVIFFDLKKKKLEDGREIEIVKEVSRSYPAAEGAEKAAQMVKDYYDAARGKEFFEWTIEARDVXELGAHVRKATHQVYAPVLYESDFFFHYVKNSKFALRSEASTALAYLLGLWVGDGLSDRAVLSVDSEDSSLLERITGYADILDLSAEYKDREIPKRAKTVCLYPKTIRGNDIRRNLNTDNPVWNAIVDLGYLKDGVKNVPSYLFSDSICHREVFLAGLIDSDGHVRGDDGLSVTIKTIHKTVMEGTVAVARSLGLIVSVNTEEAKIDKNDVNHRFVYAIYISGGDALLSVLAHCAAAKKFRAPPSNEVVRGLKKVFFEMEELKEDDYYGITLAKESDHQFLLANQLVVHNCGERGNEMAEVLMEFPELFTEKNGRKEPIMKRTTLVANTSNMPVAAREASIYTGITLAEYFRDQGKNISMIAD

SEQ ID NO: 958 - protein, 421 aa, Arabidopsis thaliana
MVWEKEKIVGSCIVGGAAFAVGASFLHLFLKGELPLGLGLGLSCPWRILRKRKPVRVYMDGCFDMMHYGHCNALRQARALGDQLVVGVVSDEEIIANKGPPVTPLHERMTMVKAVKWVDEVISDAPYAITEDFMKKLFDEYQIDYIIHGDDPCVLPDGTDAYALAKKAGRYKQIKRTEGVSSTDIVGRMLLCVRERSISDTHSRSSLQRQFSHGHSSPKFEDGASSAGTRVSHFLPTSRRIVQFSNGKGPGPDARIIYIDGAFDLFHAGHVEILRRARELGDFLLVGIHNDQTVSAKRGAHRPIMNLHERSLSVLACRYVDEVIIGAPWEVSRDTITTFDISLVVHGTVAESDDFRKEEDNPYSVPISMGIFQVLDSPLDITTSTIIRRIVANHEAYQKRNAKKEASEKKYYEQKSFVSGD

SEQ ID NO: 959 - protein, 68 aa, Daucus carota
MPSVYGDRLTTFEDSEKESEYGYVRKVSGPVVVADGMGGSAMYELVRVGHDNLIGEIIRLEGDSATIQ

SEQ ID NO: 960 - protein, 228 aa, Enterococcus faecalis V583
MTESKTAIIFDMDGVLVDSEAYYYERRKAFLAEFDLTIEGLTLPELVGADMRSLWQKIEQVNKKELDIAFLNEQYIAYKKAHPIDYLAVLDENAKRVLQFLKRQGYKIGLASSSTKDAIEEVLTVGQLSSYFDAVVSGEDFEESKPAPDIYLHTLQELAVAPQECIAIEDSEKGIASAKEAGLEVWAMRDEHFGMDQSQADAFLTQLSDICKKISENRIDESSESTPS

SEQ ID NO: 961 - protein, 475 aa, Fusobacterium nucleatum subsp. vincentii ATCC 49256
MSSLKKTKIVCTIGPVTESVETLKELLNRGMNVMRLNFSHGDYEEHGIRIKNFRQAMSETGIRGGLLLDTKGPEIRTMTLKDGKDVSIKAGQKFTFTTDQSVVGDNERVAVTYENFAKDLKVGNMVLVDDGLLELDVTEIKGNEVICVARNSGDLGQKKGINLPNVSVNLPALSEKDIEDLKFGCQNNVDFVAASFIRKADDVRQVRKVLKENGGERIQIISKIESQEGLDNFDEILAESDGIMVARGDLGVEIPVEEVPCAQKMMIKKCNRAGKVVITATQMLDSMIKNPRPTRAEANDVANAIFDGTDAIMLSGETAKGKYPLAAVEVMNKIAKKVDATIPAFYVDGVINKHDITSAVAEGSADISGRLNAKLIVVGTESGRAARDMRRYFPKANILAITNNEKTANQLVLSRGVISYVDASPKTLEEFFILAEVIAKKLNLVENNDIIIATCGESVFIQGTTNSIKVIQVKA

SEQ ID NO: 962 - protein, 1023 aa, Hordeum vulgare
METRPWLLRLIAILTTTTALLLHPSTSSSVSTAHDLPALLSFKSLITKDPLGALSSWTTNGSTHGFCSWTGVECSSAHPGHVKALRLQGLGLSGTISPFLGNLSRLRALDLSGNKLQGQIPSSIGNCFALRTLNLSVNSLSGAIPPAMGNLSKLLVLSVSKNDISGTIPTSFAGLATVAVFSVARNHVHGQVPPWLGNLTALEDLNMADNIMSGHVPPALSKLINLRSLTVAINNLQGLIPPVLFNMSSLECLNFGSNQLSGSLPQDIGSMLPNLKKFSVFYNRFEGQIPASLSNISSLEHLSLHGNRFRGRIPSNIGQSGRLTVFEVGNNELQATESRDWDFLTSLANCSSLLLVNLQLNNLSGILPNSIGNLSQKLEGLRVGGNQIAGLIPTGIGRYLKLAILEFADNRFTGTIPSDIGKLSNLKELSLFQNRYYGEIPSSIGNLSQLNLLALSTNNLEGSIPATFGNLTELISLDLASNLLSGKIPEEVMRISSLALFLNLSNNLLDGPISPHIGQLANLAIIDFSSNKLSGPIPNALGSCIALQFLHLQGNLLQGQIPKELMALRGLEELDLSNNNLSGPVPEFLESFQLLKNLNLSFNHLSGPVPDKGIFSNASVISLTSNGMLCGGPVFFHFPTCPYPSPDKLASHKLLQILVFTAVGAFILLGVCIAARCYVNKSRGDAHQDQENIPEMFQRISYTELHSATDSFSEENLVGRGSFGSVYKGTSGSGANLITAAVKVLDVQRQGATRSFISECNALKMIRHRKLVKVITVCDSLDHSGNQFKALVLEFIPNGSLDKWLHPSTEDEFGTPNLMQRLNIALDVAEALEYLHDHIDPPIVHCDVKPSNILLDDDMVAHLGDFGLAKIIRAEKSKQSLADQSCSVGIKGTIGYVAPEYGTGTEISVEGDVYSYGVLLLEMLTGRRPTDPFFSDTTNLPKYVEMACPGNLLETMDVNIRCNQEPQAVLELFAAPVSRLGLACCRGSARQRIKMGDVVKELGAIKQIIMASQNYASWSTKLY

SEQ ID NO: 963 - protein, 424 aa, Ralstonia solanacearum
MADKKGSTGEKLLYCSFCGKSQHEVKKLIAGPSVFICDECIDLCNEIIRDEAAISEKEGGLAVKSDLPTPHEIRQSLDQYVIGQEQAKKILAVAVYNHYKRLKHLGKKDDVELSKSNILLIGPTGSGKTLLAQTLARLLNVPFVIADATTLTEAGYVGEDVENIIQKLLQNCNYEVDKAQRGIVYIDEIDKISRKSDNPSITRDVSGEGVQQALLKLIEGTMASVPPQGGRKHPNQDFLQVDTTNILFICGGAFDGLEKIITQRSDKSGIGFGAEVKSKEERDVNEVLPQVEPEDLIKFGLIPELIGRLPVVATLAKLDEAALMEILVEPKNAIVKQYQKLLAMEGVELEIRPSALTAIARKAIKRKTGARGLRSIVEHALMDVMYDLPNHKGVQKVVIDESTIAGDGKPLLMYEEQPKVAGSN

SEQ ID NO: 964 - protein, 80 aa, Antirrhinum majus subsp. cirrhigerum
GSISEANTQYYQQEASKLRAQISNLQNQNRNMLGESLGALSLRELKNLESRVERGISRIRSKKNELLFAEIEYMQKRQEI

SEQ ID NO: 965 - protein, 252 aa, Arabidopsis thaliana
MEGIQHPIPRTVEEVFSDFRGRRAGLIKALSTDVQKFYHQCDPEKENLCLYGLPNETWEVNLPVEEVPPELPEPALGINFARDGMQEKDWISLVAVHSDSWLISVAFYFGARFGFGKNERKRLFQMINDLPTIFEVVTGNAKQSKDQSANHNSSRSKSSGGKPRHSESHTKASKMSPPPRKEDESGDEDEDDEQGAVCGACGDNYGGDEFWICCDACEKWFHGKCVKITPAKAEHIKHYKCPSCTTSKKMKA

SEQ ID NO: 966 - protein, 291 aa, Bifidobacterium longum NCC2705
MIMTNEATTPSGQPLGISHKPSKSGAMFTKFKAENKPAFIGYLPYGFPNPDVSLDAFKTMVEHGVDAVEIGLPYSDPVMDGPVIQAAASIALNNGETIKRVFEAVETVANAGGVPLIMSYWNLVYHYGVERFARDFENAGGAGLITPDLIPDEAGEWIEASDRHGLDRIFLVSPDSSTERLETVARNARGFVYAAARMGVTGERATIDASPELLVERTRQAGAENVCVGIGVSTAEQGAKVGSYADGVIVGSALVHTLLADDNKTARDPKEGLKLLAAKSEELAEGIHNAR

SEQ ID NO: 967 - protein, 250 aa, Triticum aestivum
  unsure (1)..(250): unsure at all Xaa locations
MTTDVGSEVVSGISEGSGEYFVRVGVGSPPMEQYLVVDSGSDVIWVQCRPCAECYQQADPLFDPAASASFAVVPCGSGVCRTLPGGSSGCADSGACRYQVSYGDGSFTQGVLAMETLTFGDSTPVQGVAIGCGHRNRGLFVGAAGLLGLGWGPMSLVGQLGGAAGGAFSYCLASRGADAGAGSLVFGRDDAMPVGAVWVPLLRNAXEPSFYYVGLTGLGVGGERLPLQDGLFDLIEDGGGGVVLDTRTAV

SEQ ID NO: 968 - protein, 276 aa, Triticum aestivum
MMSMMADLSCGASGVTVNDHQLAAPAPEDSAVAGSEKMGRGRIEIKRIENTTNRQVTFCKRRNGLLKKAYELSVLCDAEVALIVFSSRGRLYEYSNNSVKATIERYKKANSDTSNSGTVAEVNAQYYQQESSKLRQQISSLQNSNSRSLVRDSVSTMTLRDLKQLEGRLEKGIAKIRARKNELMYAEVEYMQKREMELHNDNIYLRSKVSENERGQQPMNMMASGSTSSEYDHMVPPFDSRNFLQANILQQQQQQQQHYSQQLQPTALQLGQQYFN

SEQ ID NO: 969 - protein, 535 aa, Hordeum vulgare subsp. vulgare
MEVNVKGNYVQVYVMLPLDAVSVNNRFEKGDELRAQLRKLVEAGVDGVMVDVWWGLVEGKGPKAYDWSAYKQLFELVQKAGLKLQAIMSFHQCGGNVGDAVNIPIPQWVRDVGTRDPDIFYTDGHGTRNIEYLTLGVDNQPLFHGRSAVQMYADYMTSFRENMKDFLDAGVIVDIEVGLGPAGEMRYPSYPQSHGWSFPGIGEFICYDKYLQADFKAAAAAVGHPEWEFPNDVGQYNDTPERTQFFRDNGTYLSEKGRFFLAWYSNNLIKHGDRILDEANKVFLGYKVQLAIKISGIHWWYKVPSHAAELTAGYYNLHDRDGYRTIARMLKRHRASINFTCAEMRDLEQSSQAMSAPEELVQQVLSAGWREGLNVACENALPRYDPTAYNTILRNARPHGINQSGPPEHKLFGFTYLRLSNQLVEGQNYVNFKTFVDRMHANLPRDPYVDPMAPLPRSGPEISIEMILQAAQPKLQPFPFQEHTDLPVGPTGGMGGQAEGPTCGMGGQVKGPTGGMGGQAEDPTSGMGGELPATM

SEQ ID NO: 970 - protein, 417 aa, Desulfovibrio desulfuricans G20
MDRKNDGSAQEPRCSFCQKGPDSVKRLISGPDVYICDACVELCNEIIAQEHVQESVDAGKLLSPAEIKARLDEYVIGQHTAKKILSVAVHNHYKRVFFAETLSDEVELEKSNILLVGSSGSGKTLLAKTLARVLNVPFAIADATTLTEAGYVGEDVENILVQLLQNADYDIEAASKGIVYIDEIDKISRKGDGPSITRDVSGEGVQQALLKIIEGTEANIPPKGGRKHPQQEFIRLDTSNILFIMGGAFIGLDKIIEQRMHGGAMGFGVKVASKKETPLSDLLGNVHPNDLVKFGLIPEFIGRIPVITHVNELAEDDLVRILQEPKNALVRQYQKLFELDHVKLRFTSNALRAVARQAIERKTGARGLRNVLESVMLEIMFNLPSMTGVKECVINTAVVEEGKEPIFLYQTEAKTGT

SEQ ID NO: 971 - protein, 498 aa, Eupomatia bennettii
MRINPTTSGPGVSTLEEKNLERIAQIIGPVLDVAFPPGKMPNIYNALVVKGRDTVGQQINVTCEVQQLLGNNRVRAVAMSATDGLMRGMEVIDTGAPLSVPVGGATLGRIFNVLGEPVDNLGPVDTRTTSPIHRSAPAFIQLDTKLSIFETGIKVVDLLAPYRRGGKIGLFGGAGVGKTVLIMELINNIAKAHGGVSVFGGVGERTREGNDLYMEMKESGVINEQNIEESKVALVYGQMNEPPGARMRVGLTALTMAEYFRDVNEQDVLLFIDNIFRFVQAGSEVSALLGRMPSAVGYQPTLSTEMGSLQERITSTKEGSITSIQAVYVPADDLTDPAPATTFAHLDATTVLSRGLAAKGIYPAVDPLDSTSTMLQPRIVGEEHYETAQRVKQTSQRYKELQDIIAILGLDELSEEDRLTVARARKIERFLSQPFFVAEVFTGSPGKYVGLAETIRGFQLILSGELDGLPEQAFYLVGNIDEATAKAMNLEVESNLKK

SEQ ID NO: 972 - protein, 466 aa, Arabidopsis thaliana
MDVPRPAFKCFDDDGRLKRSGTVWTASAHIITAVIGSGVLSLAWAIGQLGWIAGPTVMLLFSFVTYYSSTLLSDCYRTGDPVSGKRNYTYMDAVRSILGGFRFKICGLIQYLNLFGITVGYTIAASISMMAIKRSNCFHESGGKNPCHMSSNPYMIMFGVTEILLSQIKDFDQIWWLSIVAAIMSFTYSAIGLALGIIQVAANGVVKGSLTGISIGAVTQTQKIWRTFQALGDIAFAYSYSVVLIEIQDTVRSPPAESKTMKIATRISIAVTTTFYMLCGCMGYAAFGDKAPGNLLTGFGFYNPFWLLDVANAAIVIHLVGAYQVFAQPIFAFIEKQAAARFPDSDLVTKEYEIRIPGFRSPYKVNVFRAVYRSGFVVLTTVISMLMPFFNDVVGILGALGFWPLTVYFPVEMYIRQRKVERWSMKWVCLQMLSCGCLMITLVAGVGSIAGVMLDLKVYKPFKTTY

SEQ ID NO: 973 - protein, 411 aa, Haemophilus influenzae Rd
MTDKDKDLHCSFCGKEKGEVDRLIAGTDGYICNECIELCHSMLEESHDKNLEESAVENEEKLPTPHEIRAHLDDYVIGQDYAKKVLSVAVYNHYKRLRTNYESNDVELGKSNILLIGPTGSGKTLLAQTLARRLNVPFAMADATTLTEAGYVGEDVENVLQKLLQNCEYDTEKAEKGIIYIDEIDKISRKSEGASITRDVSGEGVQQALLKLIEGTIASIPPQGGRKHPQQEMVKLDTSKILFICGGAFAGLDKIIDKRTQTSTSIGFNAKVEKDEKQQSLSELFRQVEPDDLMKFGLIPEFIGRLPMIAPLSELDEDALIQILTKPKNALIKQYQALFGLEKVELDFTPEALKAMAKKALERKTGARGLRSIVEAVLLDTMYDLPSLENLQKVIVDESTIVDNLAPKLEY

SEQ ID NO: 974 - protein, 277 aa, Streptomyces avermitilis MA-4680
MSGAAFSRQRGQLLSDTLAAAKAEGRSALIAYLPAGFPTVDGGIAAIKAVFDGGADVVEVGLPHSDPVLDGPVIQTADDIALRGGVRIADVMRTVREAHEATGKPVLVMTYWNPIDRYGVERFTAELAEAGGAGCILPDLPVQESALWREHAEKHGLATVFVVAPSSKDARLAEITAAGSGFVYAASLMGVTGTRASVGEQAQDLVRRTRATTDLPVCVGLGVSNATQAAEVAGFADGVIVGSAFVKLMLDAEDEAAGLEAVRALAGELAKGVRGGD

SEQ ID NO: 975 - protein, 489 aa, Crispiloba disperma
GSGVSTLEKNNLGRIVQIIGPVLDVAFPPGKMPNIYNALVVKGRDTVGQPINVTCEVQQLLGNNRVRAVAMSATDGLTRGMEVIDTGAPLSVPVGGATLGRIFNVLGEPVDNLGPVDTRTTSPIHRSAPAFIQLDTKLSIFETGIKVVDLLAPYRRGGKIGLFGGAGVGKTVLIMELINNIAKAHGGVSVFGGVGERTREGNDLYMEMKESGVINEQNIAESKVALVYGQMNEPPGARMRVGLTALTMAEYFRDVNEQDVLLFIDNIFRFVQAGSEVSALLGRMPSAVGYQPTLSTEMGSLQERITSTKEGSITSIQAVYVPADDLTDPAPATTFAHLDATTVLSRGLAAKGIYPAVDPLDSTSTMLQPRIVGEEHYETAQRVKQTLQRYKELQDIIAILGLDELSEEDRLTVARARKIERFLSQPFFVAEVFTGSPGKYVGLAETIRGFQLILSGELDSLPEQAFYLVGNIDEATAKAMNLEMESNLK

SEQ ID NO: 976 - protein, 578 aa, Methanosarcina mazei
MEVKGEIYRVAGPVVTAIGLDAKMYDLCKVGNEGLMGEVIQIVGDKTIIQVYEETGGVRPGEPCVTTGMSLAVELGPGLLSSIYDGLQRPLHVLLERTGGFIGRGVTADGLDHKKLWEFKPVVKKGDGVIGGDVIGVVQETVNIEHKIMLPPDISGTVSDIRSGSFTVVDTICTLTEGPELQMMQRWPVRKPRPVKRKLTPEKPLVTGQRILDGLFPVAKGGTAAIPGPFGSGKTVTQQQLSKWSDTEIVVYIGCGERGNEMADVLWEFPELEEPQTGRPLMERTILVANTSNMPVAAREASVYTGMTLAEYFRDMGYDVSLMADSTSRWPEAMREISSRLEEMPGEEGYPAYLSARLAEFYERAGVAETLCGEKGSITAIGAVSPPGGDFSEPVTQNTLRIVKVFWALDAKLSQKRHFPAINWLNSYSLYKEDLNDWFTENVAPDYVPMRERAMDMLQTESELQEIVQLVGSDALPEEQQLLLEITRMIREIFLQQNAFHPIDTYSPFEKQYKIMKAIMKWGDAAMDALKSGVPSSEILKIESKDSLPKVKYEENFEDSLNAVLAKMDKEFAALGGK

SEQ ID NO: 977 - protein, 297 aa, Pseudomonas syringae pv. syringae B728a
MPVRARRQRHANRHEPHGRRRTHSGAAGMSRLEHRFAQLKTEGRAALVTFITAGDPGYDTSLKVLKGLPAAGADVIELGMPFTDPMADGVAIQLATLRALDAGQTLQKTLQMVSEFRVDDQTTPIVLMGYYNPIHRFGVEAFVAQAKEAGVDGLIIVDLPPEHDAELATPAQASGIDFIRLTTPTTDDARLPRVLERSSGFVYYVSVAGVTGAGSATTEHVTEAIARLRRHTDLPISVGFGIRTPEQAAAIARLADGVVVGSAFVDKIASAESPEHAIDGVLTLCAALAEGVRSARR

SEQ ID NO: 978 - protein, 440 aa, Azotobacter vinelandii
MDKTDKPCCSFCGAEKSPTVPLIAGNDGRICEACVKLAHQVVSSWGQRRKNQQLAPQLRTPVEYKKHLDESVIGQEAAKETLSVAVYNHYLRLLNCDREPVCQLGEQVELEKSNILMAGPSGTGKTLLVRTLARILGVPFAMADATTLTQAGYVGDDVDSIITRLLDAAGGDVQQAQWGIVYIDEVDKLAKRSGGGTAVRDISGEGVQQALLKMVEGTEVRISKSGRRNEHSEEQVVDTRNILFIAGGAFPGLEALVSSRIQPKNTGIGFHAQPRREAPSINELMASLLPDDLHEFGLIPEFIGRFPIITFLQELDHATLLRILTEPRNALVKQYKQLFAYQGVELVITDAALNYIADQALIRKTGARGLRAVLEAALQQTMFNMPSQPQLRGCTLDLVEHEDGGRSLEVLTRLAEDGSGRIQPDPSPVVEEKSALSADL

SEQ ID NO: 979 - protein, 992 aa, Candida glabrata
RKELKRLSLDDEAGESQYGAIYSVSGPVIVAENMIGCAMYELVKVGHDNLVGEVIRIDGDKATIQVYEETAGVTVGDPVLRTGKPLSVELGPGLMETIYDGIQRPLKAIKESSQSIYIPRGIDTPALSRDIKWQFTPGTFKTGDHISGGDIFGTVFENSLVESHKILLPPRARGTITWIAPAGEYTVDEKILEVEFDGDKYDYTMFHTWPVRVPRPVAEKLSADYPLLTGQRVLDSLFPCVQGGTTCIPGAFGCGKTVISQSLSKYSNSDTIIYVGCFAKGTQVLMADGSNQSIENIKIGDKVMGQDGKPRNVTALPRGYDDMYNVELDGETDLSYTCNSNHTLVLKTEQNVLLAGNTVSYFALGALIDETNGRAVEIVQEVQETFESNISASDFAANINREPISWTLEIRDIDYLSERVRMFTKQSVNPVLLETPTLAKQLESNESTATNLAYLLGTWIASKATTAGTISVPTTKADLLSKVKSALSSLSIDYSSESINSVSTYRRTQSIPLMENGKHVGNANITAEQEIEETMEVLSLNVTNHSSKLFHDLALSMINQDGSRSIPSAFTHEQLCVRESFVAGILDMQGCNIENGVEIDSSINGLAKLSRSLGLRCNKSSNLLKLSGNMSNISAQSTNNWTSTEDNSSAYKAQLMDFSVQKLPKDNYYGVTLDDDSDHQFLLSNLVLVHNCGERGNEMAEVLMEFPELYTEMSGRKEPIMKRTTLVANTSNMPVAAREASIYTGITLAEYFRDQGKNVSMIADSSSRWAEALREISGRLGEMPADQGFPAYLGAKLASFYERAGKSVTLGSPNRVGSVSIVAAVSPAGGDFSDPVTTATLGITQVFWGLDKKLGQRKHFPSINTSVSYSKYTNVLNKFYDSNYPEFPTLRDRMKEILSNAEELEQVVQLVGKSALSDSDKITLDVAALIKEEFLQQNGYSTYDAFCPIWKNFDMMRSFIAYHDKAQKAVSNGANWNKLSEAVSDVKHSVSS

SEQ ID NO: 980 - protein, 475 aa, Mycoplasma pulmonis
MYSIKKKSKLIATIGPSSDNYEVLKELVENGVTCVRANFSHGDYQEQKRKFDLAKKVSHDLNTPLSLMLDTKGPEIRIGKMKDGVQKIEANQSLKIWVSEEKYKNLLGTSEDISVSYNMSQDLKKGNQVLLDDGKLDTIVEKVTPEYVQVRALNSHNLKTNKRINLPGVAFSLPFLSEKDKKDIAFGVENDINYVAASFVNSKENVLELRAILKSLNAEHVQIISKIESTLGIENIDEIIEHSDGIMIARGDLGLEIPYYEVPYWQKTIIRKCRNVGKVVIVATQMLDSMEHNTNPTRAEVTDVYFATELGADTTMLSGETAQGSFPVEAVKVMSKINQRAEKEFYSKLYYNAQLESNAKLATTKRAKIAYEVAKQTQSGDFKYTVVLSASGNLLKKVANFRPNTSIIGFVEDKKLINAFGIVSSVFVSLESVQKYFELKNNPLAAISTLKNYDARPGDRFLIVHNEKITQHVVE

SEQ ID NO: 981 - protein, 472 aa, Tapiscia sinensis
STLEKKNRGRIAQIIGPVLDVDFPPGKMPNIYNALVVKGRDTIGQQINVTCEVQQLLGNNRVRAVAMSATDGLMRGIEVIDTGAPLSVPVGGATLGRIFNVLGEPVDNLGPVDTRTTSPIHKSAPAFIQLDTKLSIFETGIKVVDLLAPYRRGGKIGLFGGAGVGKTVLIMELINNIAKAHGGVSVFGGVGERTREGNDLYMEMKESGVINEQNIAESKVALVYGQMNEPPGARMRVGLTALTMAEYFRDVNEQDVLLFIDNIFRFVQAGSEVSALLGRMPSAVGYQPTLSTEMGTLQERITSTKEGSITSIQAVYVPADDLTDPAPATTFAHLDATTVLSRGLAAKGIYPAVDPLDSTSTMLQPRIVGEEHYETAQRVKETLQRYKELQDIIAILGLDELSEEDRLTVARARKIERFLSQPFFVAEVFTGSPGKYVGLAETIRGFKLILSGELDGLPEQAFYLVGNIDEAT

SEQ ID NO: 982 - protein, 489 aa, Rinorea bengalensis
INPTTSGSGVSALENKNLGRIAQIIGPVLDVAFPPGKMPNIYNALVVKGRDTVGQQINVTCEVQQLLGNNRVRAVAMSATDGLMRGMEVIDTGAPLSVPVGGATLGRIFNVLGEPVDDLGPVDTRTTSPIHRSAPAFIQLDTKLSIFETGIKVVDLLAPYRRGGKIGLFGGAGVGKTVLIMELINNIAKAHGGVSVFGGVGERTREGNDLYMEMKESGVINEENIAESKVALVYGQMNEPPGARMRVGLTALTMAEYFRDVNEQDVLLFIDNIFRFVQAGSEVSALLGRMPSAVGYQPTLSTEMGSLQERITSTKEGSITSIQAVYVPADDLTDPAPATTFAHLDATTVLSRGLAAKGIYPAVDPLDSTSTMLQPQIVGEEHYETAQRVKQTLQRYKELQDIIAILGLDELSEEDRLTVARARKIERFLSQPFFVAEVFTGSPGKYVGLAETIRGFKLILSGELDSLPEQAFYLVGNIDEATAKATNLE

SEQ ID NO: 983 - protein, 487 aa, Pachira aquatica
  unsure (1)..(487): unsure at all Xaa locations
GVXTLEKEXLGRISQIIGPVLDVAFPPGKMPNIYNALVVKGRDTAGQQINVTCEVQQLLGNNRVRAVAMSATDGLMRGMEVIDTGAPLSVPVGGATLGRIFNVLGEPVDNLGPVDTRTTSPIHKPAPAFIQLDTKLSIFETGIKVVDLLAPYRRGGKIGLFGGAGVGKTVLIMELINNIAKAHGGVSVFGGVGERTREGNDLYMEMKESGVINEQNLAESKVALVYGQMNEPPGARMRVGLTALTMAEYFRDVNEQDVLLFIDNIFRFVQAGSEVSALLGRMPSAVGYQPTLSTEMGSLQERITSTKEGSITSIQAVYVPADDLTDPAPATTFAHLDATTVLSRGLAAKGIYPAVDPLDSTSTMLQPRIVGEEHYETAQRVKQTLQRYKELQDIIAILGLDELSEEDRLTVARARKIERFLSQPFFVAEVFTGSPGKYVGLAETIRGFKLILSGELDGLPEQAFYLVGNIDEATAKATNLEMESKXK

SEQ ID NO: 984 - protein, 282 aa, Atropa belladonna
  unsure (1)..(282): unsure at all Xaa locations
EVMVGLPNSDVKHIXSGMEHAKWXVQKNVKDFWPDVKIKYIAVGNEISPVTGTSYLTSFLIPAMVNIYRAVGEAGLGNDIKVSTSVDMTLIGNSYPPSQGSFRNDARWFTDPIVGFLRDTRAPLLANIYPYFSYSGNPGQISLPYALFTAPNVVVQDGSRQYRNLFDAMLDSVYAAMHRSGGGSVGIVVSESGWPSAGAFGATTDNAATYLRNLIQHAKKGTPRKPGPIETYIFAMLDENNKNPEVGETFWIVFHPTSSPNTNSSWRISAETSVTASLKSDM

SEQ ID NO: 985 - protein, 498 aa, Justicia americana
  unsure (1)..(498): unsure at all Xaa locations
XXINPTTSGSGVAMIEKKNWGRIVQIIGPVLDVAFPPGKMPNIYNALVVQGRDTVGEAINVTCEVQQLLGNNRVRAVAMSATEGLTRGMEVIDTGAPLSVPVGGATLGRIFNVLGEPVDNLGPVDTRTTSPIHRSAPAFIQLDTKLSIFETGIKVVDLLAPYRRGGKIGLFGGAGVGKTVLIMELINNIAKAHGGVSVFGGVGERTREGNDLYMEMKESGVINEENIAESKVALVYGQMNEPPGARMRVGLTALTMAEYFRDVNEQDVLLFIDNIFRFVQAGSEVSALLGRMPSAVGYQPTLSTEMGSLQERITSTKEGSITSIQAVYVPADDLTDPAPATTFAHLDATTVLSRGLAAKGIYPAVDPLDSTSTMLQPRIVGEEHYETAQRVKQTLQRYKELQDIIAILGLDELSEEDRLTVARARKIERFLSQPFFVAEVFTGSPGKYVGLAETIRGFQLILSGELDSLPEQAFYLVGNIDEATAKAMNLEMESNLKK

SEQ ID NO: 986 - protein, 488 aa, Microcos latistipulata
  unsure (1)..(488): unsure at all Xaa locations
SGVSTLXKRNLGRISQIIGPVLDVAFPPGKMPNIYNALVVKGRDTVGQQINVTCEVQQLLGNNRVRAVAMSATDGLMRGMEVIDTGAPLSVPVGGATLGRIFNVLGEPVDNLGPVDTRTTSPIHKPAPAFIQLDTKLSIFETGIKVVDLLAPYRRGGKIGLFGGAGVGKTVLIMELINNIAKAHGGVSVFGGVGERTREGNDLYMEMKESGVINEQNLAESKVALVYGQMNEPPGARMRVGLTALTMAEYFRDVNEQDVLLFIDNIFRFVQAGSEVSALLGRMPSAVGYQPTLSTEMGTLQERITSTKEGSITSIQAVYVPADDLTDPAPATTFAHLDATTVLSRGLAAKGIYPAVDPLDSTSTMLQPRIVGEEHYETAQRVKQTLQRYKELQDIIAILGLDELSEEDRLTVARARKIERFLSQPFFVAEVFTGSPGKYVGLAETIRGFKLILSGELDGLPEQAFYLVGDIDEATAKATNLEMESKLK

SEQ ID NO: 987 - protein, 178 aa, Triticum aestivum
MADHLQVQQQHQHQLELPSGFRFHPTDEEIITSYLVPKVLNPTFTAIAIAEVDLNKNDPYELPKKAKMGEKEWYFYCQKDRKYPTGIQTNRATKAGYWKATGKDKEIFHPLPTLIGMKKTLVFYKGRAPRGEKTNWVMHEYRLEISKQPAYGPSTAIAKAAAINASSKKGRGGGKIFH

SEQ ID NO: 988 - protein, 468 aa, Bifidobacterium longum DJO10A
MRRSRQRRIMGRVVSYNEDVPRCTFCGKTEHQVRKLVAGPNASICDECIALCVDIISEERVKDAEVNSLSLPKPAQIFDYLNRYVIGQENAKRALSVAVYNHYKRVNMELQESAEQLDGNNGHGGQTGKQAKQSAPAQTRATRRNSDPLADVEVAKSNILLLGPTGVGKTYLAQALARVMNVPFVITDATTLTEAGYVGDDVETVLQRLLQAADGDVSRAQHGIIYIDEIDKIARKSGENTSITRDVSGEGVQQALLKILEGTIASVPLEGTRKHKEQDTAQMDTRGILFICGGAFVGLTDIVRKRLGRRETGFGANWHDADMKDEELLEQVNADDLAEFGLLPEFIGRLPVTSVLKELTVDDLTAILTQPANALIKQYRKLFAVDGVDLQFTEQAIRAIADIAIKQGTGARGLRSIIERTLQDTMFQLPSLDDVKQVIVDKASVEGSSTPKLLREAVDVPQGRLKVA

SEQ ID NO: 989 - protein, 435 aa, Ephedra sp. CR08
  unsure (1)..(435): unsure at all Xaa locations
QIIGPXLDVSFPLGNLPNIYNSLIVKGQIGSKEINITCEVQQLLGNNTVRTVAMSATDGLMRGMKVIDTGAPLSVPVGKMTLGRIFNVLGEPVDNLGPIDTSTTFXIHRPAPAFSQLDINLAIFETGIKVVDLLAPYRRGGKIGLFGGAGVGKTVLIMELINNIAKAHGGVSVFGGVGERTXEGNDLYMEMKESGVINEKNIIESKVALVYGQMNEPPXARMRVGLTALTMAEYFRDVNEQDVLLFIDNIFRFVQAGSEVSALLGRMPSAVGYQPTLSTEMGSLQERITFTKKGSITSIQAVYVPADDLXDPAPATTFAHLDATTVLSRGLAAKGIYPAVDPLDSTSTMLQPRIVGEKHYEIAQEVKQTLQRYKELQDIIAILGLDELSEEDRLTVARARKIERFLSQPFFVAEVFTGSPGKYVSLIETTRGFQM

SEQ ID NO: 990 - protein, 487 aa, Corynocarpus laevigatus
  unsure (1)..(487): unsure at all Xaa locations
GVSTLEKKDPGRIAQIIGPVLDVAFPPGKMPNIYNALVVKGRDTVGQQINVTCEVQQLLGNNRVRAVAMSATDGLMRGMEVIDTGAPLSVPVGGATLGRIFNVLGEPIDNLGPVDTRTTSPIHRSAPAFIQLDTKLSIFETGIKVVDLLAPYRRGGKIGLFGGAGVGKTVLIMELINNIAKAHGGVSVFGGVGERTREGNDLYMEMKESGVINEQNIAESKVALVYGQMNEPPGARMRVGLTALTMAEYFRDVNEQDVLLFIDNIFRFVQAGSEVSALLGRMPSAVGYQPTLSTEMGSLQERITSTKEGSITSIQAVYVPADDLTDPAPATTFAHLDATTVLSRGLAAKGIYPAVDPLDSTSTMLQPRIVGEEHYETAQRVKQTLQRYKELQDIIAILGLDELSEEDRLTVARARKIERFLSQPFFVAEVFTGSPGKYVGLAETIRGFKLILSGELDGLPEQAFYLVGNIDEATAKATNLEMXSXLK

SEQ ID NO: 991 - protein, 241 aa, Desulfitobacterium hafniense
MDKISRKSDNPSITRDVSGEGVQQALLKLIEGTIASVPPQGGRKHPQQEFLQVDTRNILFVVGGAFAGLDKIIQQRSTEAGGIGFGAKVKSAERKIDIGKILADVEPEDLIKFGLIPEFVGRLPVVATLEELDEPALISILTEPKNAITKQFRKLFEMENVELEFRPDALSAIAKKALKRKTGARGLRTIVESVLLDTMYELPSLENVSKVVVDESVIEHKSEPYLIYQTPPAQPKVASAE

SEQ ID NO: 992 - protein, 242 aa, Shigella dysenteriae
LKERKEGAFVPFVTLGDPGIEQSLKIIDTLIEAGADALELGIPFSDPLADGPTIQNATLRAFAAGVTPAQCIEMLALIRQKHPTIPIGLLMYANLVFNKGIDEFYAQCEKVGVDSVLVADVPVEESAPFRQAALRHNVAPIFICPPNADDDLLRQIASYGRGYTYLLSRAGVTGAENRAALPLNHLVAKLKEYNAAPPLQGFGISAPDQVKAAIDAGAAAAISGSAIVKIIEQHINEPEKML

SEQ ID NO: 993 - protein, 189 aa, Triticum aestivum
  unsure (1)..(189): unsure at all Xaa locations
DPYIDGPIIQASVARALASGTTMDAVLEMLREVTPELSCPVVLLSYYKPIMSRSLAEMKEAGVHGLIVPDLPYVAAHSLWSEAXKNNNLELXVLLTTPTIPXEDKDEGDLPXLQEXSVYLGERXRMTXPRPNVNPQWXIIQEVKKVTNNPXPFGSXIPTQKTLTNAQWGLTGDYPERMVRNWPTVSQQG

SEQ ID NO: 994 - protein, 312 aa, Glycine max
  unsure (1)..(312): unsure at all Xaa locations
MALALKSSCLLQLKKPEAGFNVCFSSKKAIISVKRYTPVAAIRIMEAVGLSATFTRLKKEGKVAFIPYITAGDPDLSTTAEALKVLDSCGSDIIELGIPYSDPLADGPGLXSSATRSLAKGTNFNVIIDMTXLEVPQLSCPIALFTYYNPILKRGTDKFMSTIRDTGVHVLVVPYVRLVRPKILKTECKNHRIELATQKQHSTKTPGXMRAIVDVAEGFVYLVSSVGVTGARASVSGSVQSLLQEIKEATTKPVAVGFGISKPEHVKQVAGWGADGVIVGSAIVKVLGEAKSPQEGLKELEVFTRSLKAALP

SEQ ID NO: 995 - protein, 491 aa, Phlox longifolia
  unsure (1)..(491): unsure at all Xaa locations
XXXXXXXXXXXXSXLEKKNQGRIIQIIGPVLDVAFPPGKMPNIYNALVVKGRDTVGQPINVTCEVHXLLGNNRVRAVAMSATDGLTRXMEVXDTGAAISVPVGEATLGRIFNVLGEPVDNLGPVDTRTTSPIHKSAPAFIQLDTTLSIFETGIKVVDLLAPYRRGGKIGLFGGAGVGKTVLIMELINNIAKAHGGVSVFGGVGERTREGNDLYMEMKESGVINEQNIAESKVALVYGQMNEPPGARMRVGLTALTMAEYFRDVNAQDVLLFIDNIFRFVQAGSEVSALLGRMPSAVGYQPTLSTEMGTLQERITSTKEGSITSIQAVYVPADDLTDPAPATTFAHLDATTVLSRGLAAKGIYPAVDPLDSTSTMLQPRIVGEXHYETAQRVKETLQRYKELQDIIAILGLDELSEEDRLTVARARKIERFLSQPFFVAEVFTGSPGKYVDLEETIRGFQLILSGELDSLPEQAFYLVGTIDEATTKAMNLE

SEQ ID NO: 996 - protein, 218 aa, Listeria monocytogenes EGD-e
MLKAIVMDFDGIVIDTEVVWYEIFKEWFKTKQNYDLSIEEFLQCVGSNVDDLFRELNEKNQMDINRQVFEAETQATFIENSKSLPAKEGVESFIRELKERGLKLALATSSQRPKPLYHLERLGLLEYFDAIITAEDVTRIKPEPDLFLEALRALDVKASESLIVEDSRNGLLAGNSAGVNVLVIPNEVTKHSDLTPNYLERESLAEVDLTEIMAEYNK

SEQ ID NO: 997 - protein, 1199 aa, Oryza sativa
  unsure (1)..(1199): unsure at all Xaa locations
XQGWKFLLQKNTHNLGVVITIWAPIVMVYFMDIQIWYAIFSTAFGGVSGALSHVGEIRTLGMLRARFKSMPEAFNKSHATAHREVLILLPSLQQACGEGRFFCVWNSFINSLREEDFISDRERDILMAPSFSSSFSVTPWPPFLVASKVPTALHMAMTSKEGDYHELIEKIRLDQARFNAVIECYESLVLILKNLLLDNNDQKIVDAIDKTVLDSVENNTLLEDFHMAEIGKVSNTLAXXNESTDGTAERKIINALQDFMEITTRDFMKDGQGXELLXLISSLDMKCNERKQRFTHLDMDMIKESFWKEKFVRLHLLLTMKDSAMDVPTNLDARRRITFFANSLFMKMPKAPQVHDMISFSVLTPYYNEEVLYSSHELNKKNEDGISILFYLQKIYPDEWKNFLERIGVDPENEEAVKGYMDDVRIWASYRGQTLARTVRGMMYYRRALELQCYEDMTNAQGXADIWLHCYTLADLDGEESARSKAIADIKFTYVVSCQLYGMHKASKDSREKGLYENILNLMLKVPXXPNGKMEKQYYSVLVKGNDEFFXEIYRIRLPGKPTDIGEGKPNNQNHAIIFTRGEALQAIDMNQDNYLEEAFKMRNLLEEFLIKHGKSEPTILGVREHIFTGSVSSLAWFMSNQETSFVTIGQRVLANTLKVRFHYGHPDVFDRIFHLTRGGISKASKVINLSEDIFAGFNSTLRQGNVTHHEYIQLGKGRDVGMNQISNFEAKVANGNGEQTLCRDIYRLGHRFDFYRMLSLYFTTVGFYFNSMVAVLTVYVFLYGRLYLVLSGLEKSILQDPQIKNIKPFENALATQSIFQLGMLLVLPMMIEVGLEKGFGRALGEFVIMQLQLASVFFTFHLGTKTHYYGRTILHGGAKYRGTGRGFVVRHAKFAENYRMYSRSHFVKALELLILLVVYLAYGISYRSSSLYLYVTISIWFLVFCWLFAPFVFNPSCFEWHKTVDDWTDWWHWMSNRGGIGLAPEQSWEAWWISEHDHLRNGTIRSLLLEFVLSLRFLIYQYGIVYHLHIVHGNRSFMVYALSWLVIAIVLVSLKVVSMGREKFITNFQLVFRILKGIVFIVLISLVVILFVVFNLTVSDVGASILAFIPTGWFILQVSDASRDVLRKIGPWDSIQEMARMYEYTMGILIFFPIAVLSWFPFVSEFQTRLLFNQAFSRGLQISRILTGQNGSGSKRDX

SEQ ID NO: 998 - protein, 323 aa, Oryza sativa (japonica cultivar-group)
MAFTVKASSPSSPATTRLTGALHGGAARVAARKLPAAAVAASLTLDRAPAPAGAERGMSSSVSRTMSRLREKGKAAFIPYITAGDPDMGTTAEALRVLDACGADVIELGVPFSDPYTDGPVIQASAARALAAGATMDGVMSMLAEVTPELSCPVVLFSYFGPIVRRGPANFTAAAKEAGVQGLIVPDLPYVETSTFRSEAIKNNLELVLLTTPATPADRMKAITAASGGFVYLVSVNGVTGSIQNVNPRVEHLLQEIKQVTDKAVCVGFGISTPDHVRQIADWGADGVIIGSAMVRQLGEAASPKQGLKRLEKYARSLKDALP

SEQ ID NO: 999 - protein, 420 aa, Leptospira interrogans serovar lai str. 56601
MAKKTPGNNGKQKLFCSFCGKEQDAVKRLVAGPGVYICDECISLCNEIIAEDHEHSHEKSEVFSEVPSPADIKSILDQYVIGQDHAKKALSVAVYNHYKRVNLKEKKSDVEIEKSNILLIGPTGSGKTLLAQTLARIIKVPFAIVDATALTEAGYVGEDVENIILKLIQNADNDIKKAEVGIIYIDEVDKIARKSDSASITRDVSGEGVQQALLKIIEGTVANVPPQGGRKHPHQEYLQVDTKNILFILGGAFVDLPNIIKSRTGIKTIGFGSEEQRIQSENKDVLMEQVIPEDLIKFGLIPEFIGRLPIVATLQELNVDMLRQIFREPKNSVLKQYTRLLELENVKLTFHDEAIDKIAELAIKRESGARGLRAIVENIMLDLMFDIPSRKDIEEVIITAEVIANRVAPTLILKKESKIA

SEQ ID NO: 1000 - protein, 499 aa, Saccharomyces cerevisiae
MSRLERLTSLNVVAGSDLRRTSIIGTIGPKTNNPETLVALRKAGLNIVRMNFSHGSYEYHKSVIDNARKSEELYPGRPLAIALDTKGPEIRTGTTTNDVDYPIPPNHEMIFTTDDKYAKACDDKIMYVDYKNITKVISAGRIIYVDDGVLSFQVLEVVDDKTLKVKALNAGKICSHKGVNLPGTDVDLPALSEKDKEDLRFGVKNGVHMVFASFIRTANDVLTIREVLGEQGKDVKIIVKIENQQGVNNFDEILKVTDGVMVARGDLGIEIPAPEVLAVQKKLIAKSNLAGKPVICATQMLESMTYNPRPTRAEVSDVGNAILDGADCVMLSGETAKGNYPINAVTTMAETAVIAEQAIAYLPNYDDMRNCTPKPTSTTETSLPRVAAVFEQKAKAIIVLSTSGTTPRLVSKYRPNCPIILVTRCPRAARFSHLYRGVFPFVFEKEPVSDWTDDVEARINFGIEKAKEFGILKKGDTYVSIQGFKAGAGHSNTLQVSTV

SEQ ID NO: 1001 - protein, 228 aa, x Citrofortunella mitis
MAAAAAAAAQWLSVCITFSVSLIIIIGSSSLVAVVSGNSEGDALYALRRSLSDPDYVLQSWDPTLVNPCTWFHITCNQDNRVTRLDLGNSNLSGHLVPELGKLEHLQYLELYKNNIQGTIPVELGNLKSLISLDLYNNNISGKIPPSLAKLKSLVFLRLNDNRLTGQIPRELVGISSLKVVDVSSNDLCGTIPTSGPFEHIPLNNFENNPRLEGPELLGLASYDTNCS

SEQ ID NO: 1002 - protein, 477 aa, Methanosarcina mazei Goe1
MEIPDHKTKIVCTIGPASSSEEMIRKLMLAGMNVARINFSHGDFESHSRVVRIIRKVADELGRTIAILADLPGPKIRIGKLEKEPVMLHKGNPITLTIDDTPGNEERIPVSYKQLPESVTPGSLIYLSDGFIQLLCKEVTGKDVLCEVLIGGELYSHKGLNLPGAKIFLDAVTEKDFRILEFALEEDIDTFSISFVENAEDIRKVRNFAASRGKQVNIVSKIERRQAVENIGEILDETDALMVARGDLGVEIPIQEVPSVQKELIQRAKLLGVPVITATHMLASMTDNIRPTRAEATDVANAILDGTDAVMLSEETAVGNYPVEAVEMMAKIAKTTENWRSRTKWGLDTMIKSITAREMSVDEVITLQVYEALQKLPVAAVLTPTRSGATPRRISRFNPDPWILAFSRVPKTCRFLSLSYGVYPVAVNESIESWEKETTERTKELGFAKSKDLVIFTQGPASGKPGGTNMLKILTLD

SEQ ID NO: 1003 - protein, 393 aa, Oryza sativa
  unsure (1)..(393): unsure at all Xaa locations
FQLRNSMKFNSNAGLPPTPXRRCSPPSASAQGGGGGLPPRKAHRRSSSDVPFGYLAGXAPAPAAQGGGRVGPPRXXGAGGAAAADDLFNAYLNLEGLDGLNSSDXXRHDEGDSRGSSIKTNGADSSENESEECADDTRGGIRLWSADGGERREGVKRNAAGAATAPLARHARSLSMDSLIGKFNFTAGTXRRLRGTVSRWGRTXFSLEFGSGEFTPSEMKKIMADEKLAEMALADPKRVKRSSSGDRVLANRQSAARSKERKMRYIAELEQKVQILQSEATNLSAQLTMMQRDSAGLATQNNELKFRLHAMEQQAQLRDALNEALTTEVQRLKLATAELGDSCSSSSLAQQIQLNAQNQMXXQLQQQQATQIPFYQLQQSQQNGAAKNNESKE

SEQ ID NO: 1004 - protein, 484 aa, Glycine max
MNNINNNRSQDQRSRPAKAATIHGCALSGDLVGLQRLLRDNPSLLNERNPVMAQTPLHVSAGHNRTEIVKFLLDWQGADKVEMEAKNMYGETPLHMAAKNGCNKAAQLLLARGAIVEARANNGMTPSHLAGWYSLRAEEFLTVKTLLEYNADCSAKDDEGMTPLNHLSQGPGTEKLRELLLWHLEEQRKQRAIEACSETKAKMDELEKQLSNIVGLNDLKVQLRKWAKGMLLDEKRRSLGLHVGRRRPPHMAFLGNPGTGKTMVARILGKLLHTVGILPTDKVTEVQRTDLVGEFVGHTGPKTRRKIKEAEGGILFVDEAYRLIPMQKSDDKDYGLEALEEIMSVMDSGKIVVIFAGYSKPMKRVITSNEGFCRRVTKFFQFNDFNSEELAQILHIKMNNLAEDSLLYGFKLHTDCSIKSLAALIERETTEKQRQETNGGLVDTMLVNARENLDLRLSFDCMDTEELLTITLVDLEAGLQLLTQ

SEQ ID NO: 1005 - protein, 218 aa, Triticum aestivum
  unsure (1)..(218): unsure at all Xaa locations
MAFALNASCYPSSFQSSLLPRRMAAAVMIPRRRNVLPVIRAVAVAPPALAPAKPAAVRGRTVSDTMAKLMAKGKTALIPYITAGDPDLATTAEALRLLXAFVAVRQLRVDLRHALLLHELGVPAGLLQHGRHVRGERRQPRRARRPRPGRASRAPRRRARPRPRGPASRAPSPSAPTSLPTPPGAARRPGGSATPTPLPWWCPGGRWVGGWAGEEELI

SEQ ID NO: 1006 - protein, 489 aa, Cerinthe major
SSGVSMLEKNNLGRVVQIIGPVLDVAFSPGKMPNIYNALVVKGRDTVGQSINVTCEVQQLLGNNRVRAVAMSATDGLTRGMEVIDTGAALSVPVGGATLGRIFNVLGEPVDNLGPVDTRTTSPIHRSAPAFIQLDTKLSIFETGIKVVDLLAPYRRGGKIGLFGGAGVGKTVLIMELINNIAKAHGGVSVFGGVGERTREGNDLYMEMKESGVINEENIAESKVALVYGQMNEPPGARMRVGLTALTMAEYFRDVNEQDVLLFIDNIFRFVQAGSEVSALLGRMPSAVGYQPTLSTEMGTLQERITSTKAGSITSIQAVYVPADDLTDPAPATTFAHLDATTVLSRGLAAKGIYPAVDPLDSTSTMLQPRIVGEEHYETAQRVKETLQRYKELQDIIAILGLDELSEEDRLTVARARKIERFLSQPFFVAEVFTGSPGKYVGLAETIRGFQLILSGELDGLPEQAFYLVGNIDEATAKAMNLEMESNLK

SEQ ID NO: 1007 - protein, 256 aa, Arabidopsis thaliana
MEGITHPIPRTVEEVFSDFRGRRAGLIKALTNDMVKFYQTCDPEKENLCLYGLPNETWEVNLPVEEVPPELPEPALGINFARDGMQEKDWVSLVAVHSDSWLLSVAFYFGARFGFGKNERKRLFQMINELPTIFEVVSGNAKQSKDLSVNNNNSKSKPSGVKSRQSESLSKVAKMSSPPPKEEEEEEDESEDESEDDEQGAVCGACGDNYGTDEFWICCDACEKWFHGKCVKITPAKAEHIKHYKCPTCSNKRARP

SEQ ID NO: 1008 - protein, 489 aa, Desulfovibrio desulfuricans G20
MLTVGISHACCCCLCPPSAFFTARTATHCALISYVFQGATMSVLTPREIVSELDKYIIGQEQAKRMVAVALRNRWRRQQLEPAIRDEVAPKNIIMMGPTGVGKTEIARRLARLSSSPFLKVEATKFTEVGYVGRDVESMIRDLMEISVNLVREEERDSVKTRAEAAAEERLLDLLLPSSPAVNTSFDTPQTPAGGAENTRNKLRTLWREGRLDHREVEMEVEMQSGPQMDVMTMPGMEDIGSQFKDMFSKAFPPKRKRRRMKVGDAYAILLQEESERLIDHEKVIELARERAEQTGIIFLDEIDKIASSQQGGKTADISREGVQRDLLPIVEGSAVNTKYGIIHTDHILFIGAGAFHYSKPSDLIPELQGRFPLRVELTALGSKEFLRILTEPKNALTVQYKALLATEGVQIEYTEDALEAVADFAQEANQETENIGARRLYTIMEKILADLSFEAPDKSGERIVIDREYVRQHLADITANRDLTRYIL

SEQ ID NO: 1009 - protein, 623 aa, Citrus unshiu
MPSVYGARLTTFEDEEKESEYGYVRKVSGPVVIADGMNGAAMYELVRVGHDNLIGEIIRLEGDSATIQVYEETAGLMVNDPVLRTHKPLSVELGPGILGNIFDGIQRPLKTIAIRSGDVYIPRGVSVPALDKDTLWEFQPKKIGEGDLLTGGDLYATVFENSLMQHHVALPPDAMGKVTYVAPAGQYSLKDTVLELEFQGVKKSFTMLQAWPVRTPRPVSSKLAADTPLLTGQRVLDALFPSVLGGTCAIPGAFGCGKTVISQALSKYSNSDTVVYVGCGERGNEMAEVLMDFPQLTMTLPDGREESVMKRTTLVANTSNMPVAAREASIYTGITIAEYFRDMGYNVSMMADSTSRWAEALREISGRLAEMPADSGYPAYLAARLASFYERAGKVKCLGGPERTGSVTIVGAVSPPGGDFSDPVTSATLSIVQVFWGLDKKLAQRKHFPSVNWLISYSKYSTALESFYEQFDPDFINIRTKAREVLQREDDLNEIVQLVGKDALAEGDKITLETAKLLREDYLAQNAFTPYDKFCPFYKSVWMMRNIIHFYNLANQAVEKGAGMDGQKITYTLIKHRLGDLFYRLVSQKFEDPAEGEPALVAKFKKLHEDLTAGFRALEDETR

SEQ ID NO: 1010 - protein, 138 aa, Ipomoea setosa
HAAELTAGFYNVPGRGGYRPIARMLARHHATLNFTCLEMRDSEQPAEAKSAPQELVQQVLSSGWKEYIDVAGENALPRYDATAYNQMLLNVRPNGVNLNGPPKPKMSGLSYLRLSDDLLQTENFGLFKKFVKKMHADL

SEQ ID NO: 1011 - protein, 477 aa, Oryza sativa
FPQPASAAAATRPIPGSYGPPLLGPLRDRLDYFWFQGPDDFFRRRAADHKSTVFRANIPPTFPFFLGVDPRVVAVVDAAAFTALFDPALVDKRDVLIGPYVPSLAFTRGTRVGVYLDTQDPDHARTKAFSIDLLRRAARNWAAELRAAVDDMLAAVEEDLNRAPAASYLIPLQKCIFRFLCKALVGADPAADGLVDRFGVYILDVWLALQLVPTQKVGVIPQPLEELLLHSFPLPSFVVKPGYDLLYRFVEKHGAAAVSIAEKEHGISKEEAINNILFVLGFNAFGGFSVFLPFLVMEVGNGRDDLRRRLREEVRRVLGGGDGGEAGFAAVREMALVRSTVYEVLRMQPPVPLQFGRARRDFVLRSHGGAAYEVGKGELLCGYQPLAMRDPAVFDRPEEFVPERFLGDDGEALLQYVYWSNGPETGEPSPGNKQCAAKEVVVATACMLVAELFRRYDDFECDGTSFTKLDKRELTPS

SEQ ID NO: 1012 - protein, 679 aa, Glycine max
  unsure (1)..(679): unsure at all Xaa locations
INKVYYSCLVKAMPKSNIPSEPERNLDQIIYKIKLPGPAILGEGKPENQNHAIIFPRVRGLQTIDMNQDNYMEEALKMRNLLQEFLKKHDGVRFPSILGLREHIFTGSVSSLAWFMSNQETSFVTIGQRLLANPLKVRFHYGHPDVFDRLFHLTRGGVSKASKVINLSEDIFAGFNSTLREGNVTHHEYIQVGKGRDVGLNQISMFEAKIANGNGEQTLSRDVYRLGHRFDFFRMLSCYFTTVGFYFSTLITVLTVYVFLYGRLYLVLSGLEEGLSTQKAIRDNKPLQVALASQSFVQIGVLMALPMLMEIGLXERGFRTALSEFILMQLQLAPVFFTFSLGTKTHYFGRTLLHGGAKYRPTGRGFVVFHAKFADNYRLYSRSHFVKGIELMILLVVYEIFGHSYRSTVAYILITASMWFMVGTWLFAPFLFNPSGFEWQKIVDDWTDWNKWISNRGGIGVLPEKSWESWWEEEQEHLQYSGMRGIIVEILLSLRFFIYQYGLVYHLNITKKGTKSFLVYGISWLVIFVILFVMKTVSVGRRKFSANFQLVFRLIKGMIFLTFVSILVILIALPHMTVQDIVVCILAFMPTGWGMLQIAQALKPVVRRAGFWGSVKTLARGYEIVMGLLLFTPVAFLAWFPFVSEFQTRMLFNQAFSRGLQISRILGGQRKERSSRNKE

SEQ ID NO: 1013 - protein, 267 aa, Helianthus annuus
MENSEAIEHEHDFSCIDRSMSFQNEDSGDISPQRRIGKGKIEIKRIENTTNRQVTFCKRRNGLLKKAYELSVLCDAEVALIVFSSRGRLYEYANNSVRGTIDRYKKSCLDPPSTGSVAEANAQFYQQEATKLRQQIANLQNQNRQFYRNIMGESLADMPGKELKNLESKLEKAINRIRAKKNELLFAEIEYMQKRELELHNSNQFLRARISENERAQQQHMSLMPGSSGYNDLGPHQSFDGLNDLQTNELQLNNNYSCQDQTPLQLV

SEQ ID NO: 1014 - protein, 736 aa, Aspergillus oryzae
MSSGNSSTGTHTNGNFATLGSSPPSAVGGKGRAIPPKVTHEDASVELKTMNPERGAARGSIPLGEDIMQIARIGEVPAMQRLFDEKKFSANHKDEEGITPLHWAAINNQYAMCKFLLDSGADVNAKGGESVATPAMWAAQRCHYYIVHLLLQRGADPLLTDVQGYNILHLATIDGNAFLLVLLLHQEIPVDVVDQQGHTGLMWAAYKGYPALVDLFLRWGAHANAVDEGGLLPHWALVNGSLPCVLKLIEYGADKFAKTRDGKTPAVVAGEMNTTRVWYRALDEYGYDLDGNAKVSSSGLASWVRNKSLMSKFFFLWPFAIVFAAVWILSNMVVYAAIPMMLVTVFGLQWVAQKAASQGPSEYRILQKTPYLSGVFAGSLFWVGFRYVFYVLPVTYSTSPILNGLFAIFFSLTTYFYIYSMVEDPGFVPKLGSRNQQRAVITELFEQWKFDEENFCVSCMVRRPLRSKHCKRCARCVAKHDHHCPWIDNCVGANNLRHFVLYITCLEVGIVLFVQLTFNYINRLPAPAQPQCNIINETLCDFVLRDTFTLVLDLWVCIQLVWITMLVAVQMIQISRNQTTYENMRGHSVDRSYPSSRAFASAVAAGTTSLNAAGLTSSGQGPNPALAQGAPRHRKHGCLQQWSSLLGIDTFFATARDGLRDGPRAVRPKNPFSRGVVTNCRDFWCDPAPYFGKREPGAAMLGGEVINYNRMYETPSRMHSGGGYQSLSVEDPEQGV

SEQ ID NO: 1015 - protein, 488 aa, Oryza sativa (japonica cultivar-group)
MGENVVGTYYYPPSAAAMDGVELGHAAAGSKLFDDDGRPRRNGTMWTASAHIITAVIGSGVLSLGWAIAQLGWVAGPAVMVLFSLVTYYTSSLLSDCYRSGDPVTGKRNYTYMDAVNANLSGFKVKICGFLQYANIVGVAIGYTIAASISMLAIGRANCFHRKGHGDPCNVSSVPYMIVFGVAEVFFSQIPDFDQISWLSMLAAVMSFTYSVIGLSLGIVQVVANGGLKGSLTGISIGVVTPMDKVWRSLQAFGDIAFAYSYSLILIEIQDTIRAPPPSESAVMKRATVVSVAVTTVFYMLCGSMGYAAFGDDAPGNLLTGFGFYEPFWLLDIANAAIVVHLVGAYQVFCQPLFAFVEKWAAQRWPESPYITGEVELRLSPSSRRCRVNLFRSTWRTAFVVATTVVSMLLPFFNDVVGFLGALGFWPLTVYFPVEMYVVQKKVPRWSTRWVCLQMLSVGCLVISIAAAAGSIAGVMSDLKVYRPFKGY

SEQ ID NO: 1016 - protein, 471 aa, Eriostemon brevifolius
GHIAQIIGPVLDVAFPPGKMPNIYNALVVKSRDTAGQPINVTCEVQQLLGNNRVRAVAMSATDGLTRGMEVIDTGAPLSVPVGGATLGRIFNVLGEPVDNLGPVDTRTTSPIHKSAPAFIQLDTRLSIFETGIKVVDLLAPYRRGGKIGLFGGAGVGKTVLIMELINNIAKAHGGVSVFGGVGERTREGNDLYMEMKESGVINEQNIAESKVALVYGQMNEPPGARMRVGLTALTMAEYFRDVNEQDVLLFIDNIFRFVQAGSEVSALLGRMPSAVGYQPTLSTEMGSLQERITSTKEGSITSIQAVYVPADDLTDPAPATTFAHLDATTVLSRGLAAKGIYPAVDPLDSTSTMLQPRIVGEEHYETAQRVKQTLQRYKELQDIIAILGLDELSEEDRLTVARARKIERFLSQPFFVAEVFTGSPGKYVGLAETIRGFKLILSGELDVLPEQAFYLVGNIDEVTAKATDLE

SEQ ID NO: 1017 - protein, 210 aa, Sulfolobus solfataricus
MRKAVIFDLDGTLANTDEVHKLAWEIALRKLGYDVKVDIRYLLGRKTIDIAKILIGESHAEKLASVKTEIYNELVKTLAKPKPCVMELINRLRDVEIPIAVVTSSMRNSAVQVLKVINVEPDVLITGDDVKLGKPNPMPVIEAIKRLNVDPNESVGVGDTIYDVMAYYSAGIREIIVVRSSVPLNVEEARKYDAKILDSLCEISDWFELF

SEQ ID NO: 1018 - protein, 419 aa, Bacillus cereus ATCC 14579
MFKFNDEKGQLKCSFCGKTQTQVRKLVAGPGVYICDECIELCTEIVQEELAKDEEVEFKDVPKPVEIREILDEYVIGQDSAKKALAVAVYNHYKRINSNSKIDDVELAKSNIALIGPTGSGKTLLAQTLARILNVPFAIADATSLTEAGYVGEDVENILLKLIQAADYDVEKAEKGIIYIDEIDKVARKSENPSITRDVSGEGVQQALLKILEGTVASVPPQGGRKHPHQEFIQIDTTNILFICGGAFDGIEPIIKRRLGEKVIGFGSEKKNADVNEKHVLSHVLPEDLLRFGLIPEFIGRLPVIANLEPLDEDALVDILTKPKNALVKQFQKLLELDDVELEFEEGALIEIAKKAIERKTGARGLRSIIEGLMLDVMFELPSRKDIEKCILTKETVADNEPPKLVLQDGTVLDTKTSA

SEQ ID NO: 1019 - protein, 490 aa, Eucryphia milliganii
  unsure (1)..(490): unsure at all Xaa locations
INPTXSSXGVSALEKKNLERIVQIIGPXLDVAFPPGKMPNIYNALVVKGRDTVGQQINVXCEVQQLLGNNRVRAVAMSATDXLMRGMEVIDTGAPLSVPVGGATLGRIFNVLGEPIDNLGPVDTRTTSPIHRSAPAFIQLDTKLSIFETGIKVVDLLAPYPRGGKIGLFGGAGVGKTVLIMELINNIAKAHGGVSVFGGVGERTREGNDLYMEMKESGVINEENIAESKVALVYGQMNEPPGARMRVGLTALTMAEYFRDVNEQDVLLFIDNIFRFVQAGSEVSALLGRMPSAVGYQPTLSTEMGSLQERITSTKEGSITSIQAVYVPADDLTDPAPATTFAHLDATTVLSRGLAAKGIYPAVDPLDSTSTMLQPRIVGEEHYETAQRVKQTLQRYKELQDIIAILGLDELSEEDRLTVARARKIERFLSQPFFVAEVFTGSPGKYVGLAETIRGFKLILSGELDGLPEQAFYLVGNIDEXTAKXXNLDT

SEQ ID NO: 1020 - protein, 271 aa, Heliobacillus mobilis
MSTKGGTERIEHTFQQLKAEGRTAFIPYITAGDPDLNTTAELVLALEASGASIVELGVPFSDPVADGPVIQEAACRALAGGVTLMKVLKMVEELRNRSQVPIVLMTYYNLLMRMGLKRFAQEAYAAGVDGVIIADLPVEEGDELRSYLDEVGIALIPLVAPTTPPERIQLIAEKARGFIYCVSLLGVTGDRTELPPDVDLLLNRVREQTDLPLGLGFGISTAAHASAVAPKADGVIVGSAIVKRIAQHPDDKDQAIAEVRQFTKEITAALA

SEQ ID NO: 1021 - protein, 470 aa, Escherichia coli
MKKTKIVCTIGPKTESEEMLAKMLDAGMNVMRLNFSHGDYAEHGQRIQNLRNVMSKTGKTAAILLDTKGPEIRTMKLEGGNDVSLKAGQTFTFTTDKSVIGNSEMVAVTYEGFTTDLSVGNTVLVDDGLIGMEVTAIEGNKVICKVLNNGDLGENKGVNLPGVSIALPALAEKDKQDLIFGCEQGVDFVAASFIRKRSDVIEIREHLKAHGGENIHIISKIENQEGLNNFDEILEASDGIMVARGDLGVEIPVEEVIFAQKMMIEKCIRALKVVITATMMLDSMIKNPRPTRAEAGDVANAILDGTDAVMLSGESAKGKYPLEAVSIMATICERTDRVMNSRLEFNNDNRKLRITEAVCRGAVETAEKLDAPLIVVATQGGKSARAVRKYFPDATILALTTNEKTAHQLVLSKGVVPQLVKEITSTDDFYRLGKELALQSGLAHKGDVVVMVSGALVPSGTTNTASVHVL

SEQ ID NO: 1022 - protein, 189 aa, Allium cepa
VFWGLDKKAQRKHFPSVNWLISYSKYSKALESFYDKFDSDFIDIRTKAREVLQREDDLNEIVQLVGKDALAETDKITLETAKLLREDYLAQNAFTPYDKFCPFYKSVWMMRNIIHFNTLANQAVERGAGSDGQKITYSVIKHRLGDLFYRLVSQKFEDPAEGEDVLVAKFKKLYDDLTVGFRNLEDESR

SEQ ID NO: 1023 - protein, 474 aa, Oryza sativa
  unsure (1)..(474): unsure at all Xaa locations
MEFVANGKVILFLLFVSTSVLIVSPASPPRFHYINPHNFTTPASSSSSASASAVHRSRNNNNPSLSLVHRDAISGATYPSRRHQVVGLVARDNARVEHLEKRLVXXSTSPYLPEDLVSEVVPGVDDGSGEYFVRVGVGSPPTDQYLVVDSGSDVIWVQCRPCEQCYAQTDPLFDPAASSSFSGVSCGSAICRTLSGTGCGGGGDAGKCDYSVTYGDGSYTKGELALETLTLGGTAVQGVAIGCGHRNSGLFVGAAGLLGLGWGAMSLVGQLGGAAGGVFSYCLASRGAGGAGSLVLGRTEAVPVGAVWVPLVRNNQASSFYYVGLTGIGVGGERLPLQDSLFQLTEDGAGGVVMDTGTAVTRLPREAYAALRGAFDGAMGALPRSPAVSLLDTCYDLSGYASVRVPTVSFYFDQGAVLTLPARNLLVEVGGAVFCLAFAPSSSGISILGNIQQEGIQITVDSANGYVGFGPNTC

SEQ ID NO: 1024 - protein, 432 aa, Samolus repens
  unsure (1)..(432): unsure at all Xaa locations
GQPITVTCEVQQLLGTNRVRAVAMSASEGLTRGMEVIDTGAALSVPVGGATLGRIFNVLGEPVDNLGPVDTRTTSPIHRSAPAFIQLDTKLSIFETGIKVVDLLAPYRRGGKIGLFGGAGVGKTVLIMELINNIAKAHGGVSVFGGVGERTREGNDLYMEMKESGVINEENIAESKVALVYGQMNEPPGARMRVGLTALTMAEYFRDVNEQDVLLFIDNIFRFVQAGSEVSALLGRMPSAVGYQPTLSTEMGSLQERITSTKEGSITSIQAVYVPADDLTDPAPATTFAHLDATTVLSRGLAAKGIYPAVDPLDSTSTMLQPRIVGEEHYEIAQRVKQTLQRXKELQDIIAILGLDELSEEDRLTVARARKIERFLSQPFFVAEVFTGSPGKYVGLAETIRGFQLILSGQLDGLPEQAFYLVGNIDEATAKA

SEQ ID NO: 1025 - protein, 271 aa, Thermus aquaticus
MTTLEAFAKARSEGRAALIPYLTAGFPSREGFLQAVEEVLPYADLLEIGLPYSDPLGDGPVIQRASELALRKGMSVQGALELVREVRALTEKPLFLMTYLNPVLAWGPERFFGLFKQAGATGVILPDLPPDEDPGLVRLAQEIGLETVFLLAPTSTDARIATVVRHATGFVYAVSVTGVTGMRERLPEEVKDLVRRIKARTALPVAVGFGVSGKATAAQAAVADGVVVGSALVRALEEGRSLAPLLQEIRQGLQRLEANPGLKESSKKPLS

SEQ ID NO: 1026 - protein, 242 aa, Panax ginseng
MSFYDDQSGNLSPQRKLGRGKIEIKRIENTTNRQVTFCKRRNGLLKKAYELSVLCDAEVALIVFSTRGRLYEYANNSVKGTIERYKKACTDSPNTSSVSEANAQFYQQEASKLRQEISSIQKNNRNMMGESLGSLTVRDLKGLETKLEKGISRIRSKKNELLFAEIEYMQKKEIDLHNNNQYLRAKIAENERAQQHMNLMPGSSDYELAPPQSFDGRNYIQLNGLQPNNHYSRQDQTALQLV

SEQ ID NO: 1027 - protein, 370 aa, Pisum sativum
MASFFARTRRFSLVSLFLLELFTINLIPTTDAQIGICYGMMGNNLPPANEVIALYKANNIKRMRLYDPNQPALNALRDSGIELILGIPNSDLQTLATNQDSARQWVQRNVLNFYPSVKIKYIAVGNEVSPVGGSSWLAQYVLPATQNVYQAIRAQGLHDQIKVTTAIDMTLIGNSFPPSKGSFRSDVRSYLDPFIGYLVYAGAPLLVNVYPYFSHIGNPRDISLPYALFTSPGVMVQDGPNGYQNLFDAMLDSVHAALDNTGIGWVNVVVSESGWPSDGGSATSYDNARIYLDNLIRHVGKGTPRRPWATEAYLFAMFDENQKSPELEKHFGVFYPNKQKKYPFGFGGERRDGEIVEGDFNGTVSLKSDM

SEQ ID NO: 1028 - protein, 359 aa, Glycine max
  unsure (1)..(359): unsure at all Xaa locations
MACNIRASTRLHQGIFQTFSNNVKTSTPRFVHSCPATFIQNLLKFRRDKPTEQLYRALDQCGFDLNHDLVLDVLRRHRSDWRPAHVFFNWASKTTTGYQPSSDVCNEIVDILGKMQRFQELHQVLDEMSKREELLDEAVFATLVRRFVGAHKVDEAIQLFYRRKEFGLELNSEAFRTLLMWLCRYKHVEDAEALFHNSVKKGLRFXSCTLQKINVLVIKFSDKSCFFXLGLINYLVPMLVVSTXILILYLKTQSFSLHTSNILCFKKKKKKGGKPDVVICNCIIDALCFKKRIPEALEIFCDMSERGCEPNVATYNSLIKYMCKIQRMEKVYELVDEMERKKGSCLPNAVTYCYLLKSL

SEQ ID NO: 1029 - protein, 783 aa, Oryza sativa
MSRGGGGCCPSMDLMRSEAMQLVQVIIPAESAHLAVSYLGDLGLLQFKDLNADKSPFQRTYASQIKRCGEMARKLRFFREQMSKAAIATSTQFSGTSLEIDDLEVKLGELEVELTEVNANNDKLQRTYNELVEYNIVLQKEMVTDPSKQVKLGSLSGLVPKEKAMAFERILFRATRGNMFLRQEPVDETVTDPLSGEKVIKNAFVIFYSGERAKSKIVKICDAFGANRYPFPEDLGKQLQTIQEVSGKISELKATIEIGLAHRDSILKNISSEFEQWNTLVKKEKAIYHTLNMLSLDVTKKCLVAEGWSPVFATSQIQDALQRATVDSKSQVGSIFQVLNTQESPPTFFQTNKFTSAFQEIVDAYGIAKYQEANPGVFTIVTFPFLFAIMFGDWGHGICLLLATLYLIIREKKLASQKLDDIMDMMFGGRYVILMMSLFSIYTGLIYNEFFSVPFELFGKSAYACRDPSCGDATTEGLIKVRPAYSFGVDPVWHGSRSELPFLNSLKMKLSILIGVAQMNLGIMMSYFNAKFFRNAINVWYQFIPQLIFLNSLFGYLSLLIIIKWCTGSKADLYHVMIYMFLSPTDDLGENELFPGQKLVQLVLLLLALVSVPWMLIPKPFFLKKQHEQRHQGQQYTMLQATDESVTELEEHQDDPHHHEEFEFSEVFVHQLIHTIEFVLGAVSNTASYLRLWALSLAHSELSTVFYEKVLVLSWGYNNIFILIIGAVIFLFATIGVLLVMETLSAFLHALRLHWVEFQNKFYEGDGYKFVPFAFASIIEEED

SEQ ID NO: 1030 - protein, 218 aa, Saccharomyces cerevisiae
MFTWTIYVSLLLVLAGTFLMNRNTNTDIIDTFKREVDLPIPAQPGPPFPLVTDYCDIVCGFGRGSAELGIPTANVPINQLPKGINDLDLGVYFGFAHIKTVDGQELSVETRRDGRTVVYNYGQYLSEANDDLSVLPMVLSVGKNPFYGNDFKTMELHIIHDFKNDFYGARVKFNILGHIRPELNYTTKEALIEDINIDIRTAQTVLATPPYQVFKQQL

SEQ ID NO: 1031 - protein, 497 aa, Arabidopsis thaliana
MAMEQRPKTKIVCTLGPASRSVPMVEKLLMAGMSVARFNFSHGSYEYHQETLDNLRQAMLNTGMLCAVMLDTKGPEIRTGFLKDGKPIQLKQGQEITISTDYDLKGDEKTICMSYKKLAQDVNPGMVILCADGTISLKVLSCDKEKGTVRCRCENTSMLGERKNVNLPGVVVDLPTLTEKDKQDILEWGVPNQIDMIALSFVRKGSDLVQVRKLLGKHAKTILLMSKVENQEGVANFDDILINSDAFMIARGDLGMEIPIEKIFLAQKVMIYKCNFMGKPVVTATQMLESMIKSPRPTRAEATDVANAVLDGTDCVMLSGETAAGAYPELAVRTMAKICVEAESTLDYGDIFKRIMLHAAVPMSPMESLASSAVRTATSSRATLMMVLTRGGSTARLVAKYRPGIPILSVVVPEITSDSFDWACSNEAPARHSLIYRGLVPVLYAGSARASIDESTEETLEFASEYGKKKQLCKTGDSVVALFRTGNAIVIKILTVK

SEQ ID NO: 1032 - protein, 591 aa, Chlamydophila pneumoniae CWL029
MVTVSEQTAQGHVIEAYGNLLRVRFDGYVRQGEVAYVNVDNTWLKAEVIEVADQEVKVQVFEDTQGACRGALVTFSGHLLEAELGPGLLQGIFDGLQNRLEVLAEDSSFLQRGKHVNAISDHNLWNYTPVASVGDTLRRGDLLGTVPEGRFTHKIMVPFSCFQEVTLTWVISEGTYNAHTVVAKARDAQGKECAFTMVQRWPIKQAFIEGEKIPAHKIMDVGLRILDTQIPVLKGGTFCTPGPFGAGKTVLQHHLSKYAAVDIVILCACGERAGEVVEVLQEFPHLIDPHTGKSLMHRTCIICNTSSMPVAARESSIYLGVTIAEYYRQMGLDILLLADSTSRWAQALREISGRLEEIPGEEAFPAYLSSRIAAFYERGGAITTKDGSEGSLTICGAVSPAGGNFEEPVTQSTLAVVGAFCGLSKARADARRYPSIDPLISWSKYLNQVGQILEEKVSGWGGAVKKAAQFLEKGSEIGKRMEVVGEEGVSMEDMEIYLKAELYDFCYLQQNAFDPVDCYCPFERQIELFSLISRIFDAKFVFDSPDDARSFFLELQSKIKTLNGLKFLSEEYHESKEVIVRLLEKTMVQMA

SEQ ID NO: 1033 - protein, 1022 aa, Saccharomyces cerevisiae
GAIYSVSGPVVIAENMIGCAMYELVKVGHDNLVGEVIRIDGDKATIQVYEETAGLTVGDPVLRTGKPLSVELGPGLMETIYDGIQRPLKAIKEESQSIYIPRGIDTPALDRTIKWQFTPGKFQVGDHISGGDIYGSVFENSLISSHKILLPPRSRGTITWIAPAGEYTLDEKILEVEFDGKKSDFTLYHTWPVRVPRPVTEKLSADYPLLTGQRVLDALFPCVQGGTTCIPGAFGCGKTVISQSLSKYSNSDAIIYVGCFAKGTNVLMADGSIECIENIEVGNKVMGKDGRPREVIKLPRGRETMYSVVQKSQHRAHKSDSSREVPELLKFTCNATHELVVRTPRSVRRLSRTIKGVEYFEVITFEMGQKKAPDGRIVELVKEVSKSYPISEGPERANELVESYRKASNKAYFEWTIEARDLSLLGSHVRKATYQTYAPILYENDHFFDYMQKSKFHLTIEGPKVLAYLLGLWIGDGLSDRATFSVDSRDTSLMERVTEYAEKLNLCAEYKDRKEPQVAKTVNLYSKVVRGNGIPNNLNTENPLWDAIVGLGFLKDGVKNIPSFLSTDNIGTRETFLAGLIDSDGYVTDEHGIKATIKTIHTSVRDGLVSLARSLGLVVSVNAEPAKVDMNGTKHKISYAIYMSGGDVLLNVLSKCAGSKKFRPAPAAAFARECRGFYFELQELKEDDYYGITLSDDSDHQFLLANQVVVHNCGERGNEMAEVLMEFPELYTEMSGTKEPIMKRTTLVANTSNMPVAAREASIYTGITLAEYFRDQGKNVSMIADSSSRWAEALREISGRLGEMPADQGFPAYLGAKLASFYERAGKAVALGSPDRTGSVSIVAAVSPAGGDFSDPVTTATLGITQVFWGLDKKLAQRKHFPSINTSVSYSKYTNVLNKFYDSNYPEFPVLRDRMKEILSNAEELEQVVQLVGKSALSDSDKITLDVATLIKEDFLQQNGYSTYDAFCPIWKTFDMMRAFISYHDEAQKAVANGANWSKLADSTGDVKHAVSSSKFFEPSRG

SEQ ID NO: 1034 - protein, 173 aa, Triticum aestivum
  unsure (1)..(173): unsure at all Xaa locations
MATPAALGRHAVRARAAATTLAPAPLPAGNGGLSVAKAMSRARDNGMTAFIPYITAGDPDLATTAEALRLLDACGADVIEVGMPFSNPYADGAVIQASAXRALAAGATSDTVMAMLKEVTPELSCPVVIFSYFNPIERRGTGSFTAAAREAGVRGLIVPDLPYTEASVLSIEA

SEQ ID NO: 1035 - protein, 479 aa, Moringa oleifera
VSTLEKKNLGRIAQIIGPVLDVAFPPGKMPNIYNALVVKGRDTVGQQINVTCEVQQLLGNNRVRAVAMSATDGLMRGMEVIDMGAPLSVPVGGATLGRIFNVLGEPVDNLGPVDTRTTSPIHKSAPAFIQLDTKLSIFETGIKVVDLLAPYRRGGKIGLFGGAGVGKTVLIMELINNIAKAHGGVSVFGGVGERTREGNDLYMEMKESGVINEQNLAESKVALVYGQMNEPPGARMRVGLTALTMAEYFRDVNEQDVLLFIDNIFRFVQAGSEVSALLGRMPSAVGYQPTLSTEMGSLQERITSTKEGSITSIQAVYVPADDLTDPAPATTFAHLDATTVLSRGLAAKGIYPAVDPLDSTSTMLQPRIVGEEHYETAQRVKQTLQRYKELQDIIAILGLDELSEEDRLTVARARKIERFLSQPFFVAEVFTGSPGKYVGLAETIRGFKLILSGELDSLPEQAFYLVGNIDEATAKATNL

SEQ ID NO: 1036 - protein, 450 aa, Rickettsia prowazekii
MKSTETTYKKDNMGLTPSQIVNELNRFIVGQDKAKKAVAIALRNRYRRKRVEGNLRNEIVPKNILMIGSTGVGKTEIARRLAKLTNSPFYKIEATKFTEVGYVGRDVESIIRDLVEIAVNTEKALAKIAVDINAREKAIERILDSLVGKTSSSETREKFKAKVLNGELDDTEIEISVADTTPVGGGGFEIPCIPGASMGVLNLGDMIGRALGNSKTKTKKMLIKDAMTVIIPEESEKLIDQEKIIQKAINLAENDGIVFIDEIDKIASTSNAGAKNAEISREGVQRDLLPLIEGTTVNTKYGPVKTDHILFIASGAFHIAKPSDLLPELQGRLPIRVELNLLTKDDMIKILLEPETSLIKQYSALIGTEEVHLEFTDAAIEKIADYAITVNLEVEDIGARRLHTILENLLEDISFEASEMKVKKIIIDDKFVENQLSKIITNLDLAKFVL

SEQ ID NO: 1037 - protein, 483 aa, Omphalogramma delavayi
MRINPTTSGPGASVLEKKNLGRIIQIIGPVLDVSFPPGKMPNIYNALVVKGRDTSGQPINVTCEVQQLLGNNRVRAVAMSATDGLTRGMEVIDTGAALSVPVGGATLGRIFNVLGEPVDNLGPVDTCTTSPIHRSAPAFIQLDTKLSIFETGIKVVDLLAPYRRGGKIGLFGGAGVGKTVLIMELINNIAKAHGGVSVFGGVGERTREGNDLYMEMKESGVINEENIAESKVALVYGQMNEPPGARMRVGLTALTMAEYFRDVNEQDVLLFIDNIFRFVQAGSEVSALLGRMPSAVGYQPTLSTEMGSLQERITSTKEGSITSIQAVYVPADDLTDPAPATTFAHLDATTVLSRGLASKGIYPAVDPLDSTSTMLQPRIGGEEHYETGQRVKETLQRYKKLQDIIAILGLDELSEEDRLTVARARKIERFLSQPFFVAEVFTGSPGKYVALAETIRGFQLILSGELDGLPEQAFYLVGNIDEA

SEQ ID NO: 1038 - protein, 268 aa, Escherichia coli
MERYESLFAQLKERKEGAFVPFVTLGDPGIEQSLKIIDTLIEAGADALELGIPFSDPLADGPTIQNATLRAFAAGVTPAQCFEMLALIRQKHPTIPIGLLMYANLVFNKGIDEFYAQCEKVGVDSVLVADVPVEESAPFRQAALRHNVAPIFICPPNADDDLLRQIASYGRGYTYLLSRAGVTGAENRAALPLNHLVTKLKEYNAAPPLQGFGISAPDQVKAAIDAGAAGAISGSAIVKIIEQHINEPEKMLAALKAFVQPMKAATRS

SEQ ID NO: 1039 - protein, 499 aa, Ipomoea batatas
MAPIPGVMPIGNYVSLYVMLPLGVVNADNVFPDKEKVEDELKQVKAGGCDGVMVDVWWGIIEAKGPKQYDWSAYRELFQLVKKCGLKIQAIMSFHQCGGNVGDAVFIPIPQWILQIGDKNPDIFYTNRAGNRNQEYLSLGVDNQRLFQGRTALEMYRDFMESFRDNMADFLKAGDIVDIEVGCGAAGELRYPSYPETQGWVFPGIGEFQCYDKYMVADWKEAVKQAGNADWEMPGKGAGTYNDTPDKTEFFRPNGTLQDGYGQVFLTWYSNKLIIHGDQVLEEANKVFVGLRVNIAAKVSGIHWWYNHVSHAAELTAGFYNVAGRDGYRPIARMLARHHATLNFTCLEMRDSEQPAEAKSAPQELVQQVLSRQVKEYIDVAGENALPRYDATAYNQMLLKLRPNGVNLNGPPKLKMSGLTYLRLSDDLLQTDNFELFKKFVKKMHADLDPSPNAISPAVLERSNSAITIDELMEATKGSRPFPWYDVTDMPVDGSNPFD

SEQ ID NO: 1040 - protein, 490 aa, Idesia polycarpa
  unsure (1)..(490): unsure at all Xaa locations
SGXGVSALEKNNLGHIAQIIGPVLDVAFPPGRMPNIYNALVVKGRDTVGQQINVTCEVQQLLGNNRVRAVAMSATDGLMRGMEVIDTGAPLSVPVGGATLGRIFNVLGEPVDDLGPVDTRTTSPIHRSAPAFIQLDTKLSIFETGIKVVDLLAPYRRGGKIGLFGGAGVGKTVLIMELINNIAKAHGGVSVFGGVGERTREGNDLYMEMKESGVINEENIAESKVALVYGQMNEPPGARMRVGLTALTMAEYFRDVNEQDVLLFIDNIFRFVQAGSEVSALLGRMPSAVGYQPTLSTEMGSLQERITSTKEGSITSIQAVYVPADDLTDPAPATTFAHLDATTVLSRGLAAKGIYPAVDPLDSTSTMLQPQIVGEEHYETAQRVKQTLQRYKELQDIIAILGLDELSEEDRLTVARARKIERFLSQPFFVAEVFTGSPGKYVGLAETIRGFKLILSGELDGLPEQAFYLVGNIDEATAKATNLEMENNLK

SEQ ID NO: 1041 - protein, 394 aa, Oryza sativa
  unsure (1)..(394): unsure at all Xaa locations
MLPRLLRRSPRPRPRPPPRRRHISRRGWRWPTEREVAAAAAGSRGHHAYSRKQKSLGLLCTNFVALYDREDVESVGLDDAARRLGVERRRIYDIVNVLESIGMLVRRAKNRYTWIGFGGVPAALAKLKXSRMMRMMTSXMMLRAMRRARSSASASPLTXPSDKPDAPPCKLRSEHRKEKSLGLLTQNFVKLFLTMERNLYLIQIETISLDEAAKRLLGEGHAANNMRTKVRRLYDIANVLSSLNLIEKTQQADSRKPAFRWLGQAKRNEGVTVAFKTLPNKRAFGTDLTNIDNKRGKLDSTMENRGKPTQDGGNLFNNLQRQLGQENRSDFVYGPFHPAVARKQEHDKRRRGRALDWENLASSFRPQYQNPGELHSLYISISPNECCFKNPFCI

SEQ ID NO: 1042 - protein, 816 aa, Mesembryanthemum crystallinum
MADRGCCPPMDLMRSEPMQLVQLIVPLESSHLTVSYLGDLGLVQFKDLNADKSPFQRTYANQIKKSGEMARRLRYFREQMLNAGISIPAMTSNKNDIKVDDLEVKLAELESELSEMNANNEKLQRAYNELVEYKLVLQKSGEFFYSAQRSAAAQQRETEPEHTEESLNTPLLMDEDKSADPSKSIQLGFFTGLVPRDKSMAFERILFRATRGNVFVRQATVENPVTDPASGEKVEKNVFVIFYSGDRAKNKILKICEAFGANRYSFYEEAGKQAQMLKEVSGRLSELRTTIDAGLLHRGNLLQTIGDQFEQWNLLVRKEKSIYHTLNMLSMDVTTKCLVAEGWCPVFATKEIQDTLHRATVDSNSEVEAIFQVLHTRESLPTYFRTNKFTSSFQEIVDAYGIARYQEANPSVYTIVTFPFLFAVMFGDWGHGICILLATSILILREKKLSSQKLGDIMEMMFGGRYVIFMMALFSIYTGLIYNEFFSVPFELFGKSAYECRDPSCKDATVDGLIKVRDAYPFGLDPVWHGSRSELPFLNSLKMKMSILLGVSQMNLGIIMSFFNAKFFRSCVDIWFQFIPQIIFLNSLFGYLSVLIIVKWCTGSKADLYHVMIYMFLSPTDELGENELFPGQKTAQQVLLLLALVAVPWMLLPKPFIMKWQHQNRHQGESYEPLQGEESLQVETTHDSHGGHEEFEFSEVLVHQLIHTIEFVLGAVSNTASYLRLWALSLAHSELSSVFYDKVLLLAWGFNNVLILIVGIIVFIFATVGVLLVMETLSAFLHALRLHWVEFQNKFYLGDGYKFYPFSFSTIGEEEE

SEQ ID NO: 1043 - protein, 408 aa, Streptococcus agalactiae NEM316
MAGNRNNDMNVYCSFCGKSQDEVKKIIAGNGVFICNECVALSQEIIKEELAEEVLADLAEVPKPKELLEILNQYVVGQDRAKRALAVAVYNHYKRVSYTESSDDDVDLQKSNILMIGPTGSGKTFLAQTLAKSLNVPFAIADATSLTEAGYVGEDVENILLKLIQAADYNVERAERGIIYVDEIDKIAKKGENVSITRDVSGEGVQQALLKIIEGTVASVPPQGGRKHPNQEMIQINTKNILFIVGGAFDGIEDLVKQRLGEKIIGFGQTSRKIDDNASYMQEIISEDIQKFGLIPEFIGRLPVVAALELLTAEDLVRILTEPRNALVKQYQTLLSYDGVELEFDQDALLAIADKAIERKTGARGLRSIIEETMLDIMFEIPSQEDVTKVRITKAAVEGTDKPVLETA

SEQ ID NO: 1044 - protein, 758 aa, Taraxacum officinale
MWKLKIAEGGDDEWLTTTNNHVGRQHWQFDPDAGTEEERAEIEKIRLNFKLNRFQFKQSADLLMRTQLRKENPINKIPDAIKLNETEEVTNDAVTTTLKRAISFYSTIQAHDGHWPAESAGPLFFLPPLVIALYVTGAMNDILTPAHQLEIKRYIYNHQNEDGGWGLHIEGHSTIFGSVLSYITLRLLGEEADSVAEDMALVKGRKWILDHGGAVGIPSWGKFWLTILGVYEWGGCNPMPPEFWLMPKFFPIHPGKMLCYCRLVYMPMSYLYGKRFVGKITELVRDLRQELYTDPYDEINWNKARNTCAKEDLYYPHPFVQDMVWGVLHNVVEPVLTSRPISTLREKALKVAMDHVHYEDKSSRYLCIGCVEKVLCLIATWVEDPNGDAYKRHLARIPDYFWVAEDGMKMQSFGCQMWDAAFAIQAIFSSNLTEEYGPTLKKAHEFVKASQVRDNPPGDFSKMYRHTSKGAWTFSIQDHGWQVSDCTAEGLKVSLLYSQMNPKLVGEKVETEHLYDAVNVILSLQSENGGFPAWEPQRAYAWLEKFNPTEFFEDVLIEREYVECTSSAIQGLTLFKKLHPGHRTKEIEHCISRAVKYVEDTQESDGSWYGCWGICYTYGTWFAVDALVACGKNYHNCPALQKACKFLLSKQLPDGGWGESYLSSSNKVYTNLEGNRSNLVHTSWALISLIKAGQAEIDPTPISNGVRLLINSQMEEGDFPQQEITGVFMKNCNLNYSSFRNIFPIWALGEYRRIVQNI

SEQ ID NO: 1045 - protein, 405 aa, Populus nigra
MGFLCCSGKPSKRLESSSINENNSNIKRKDQTHVTSGSLKMKPYVNNLSKEGESKDDQLSLDVKSLNMKDEISKDRRSNGKQAQTFTFEELAAATSNFRSDCFLGEGGFGKVYKGYLDKINQAVAIKQLDRNGVQGIREFVVEVVTLSLADHPNLVKLIGFCAEGDQRLLVYEYMPLGSLENHLHDIPPNRQPLDWNTRMKIAAGAAKGLEYLHNEMKPPVIYRDLKCSNILLGEGYHPKLSDFGLAKVGPSGDKTHVSTRVMGTYGYCAPDYAMTGQLTFKSDIYSFGVVLLELITGRKAIDQRKERGEQNLVAWARPMFKDRRNFSCMVDPLLQGQYPIRGLYQALAIAAMCVQEQPNMRPAVSDLVMALNYLASHKYDPQVHSVQDSRRSPSRPGLDKDRGQ

SEQ ID NO: 1046 - protein, 249 aa, Oryza sativa
  unsure (1)..(249): unsure at all Xaa locations
MGRGKIEIKRIENTTNRQVTFCKRRNGLLKKAYELSVLCDAEVALIVFSSRGRLYEYANNSVKSTVERYKKANSDTSNSGTVAEVNAQHYQQESSKLRQQISSLQNANSRTIVGDSINTMSLRDLKQVENRLEKGIAKIRARKNELLYAEVEYMQKREVELQNDNMYLRSKVVENERGQQPLNMMGAASTSEYDHMVNNPYDSRNFLQVNIMQQPQHYAHQLQPTTLQLGQXSRPSISFGVDTVRTHVR

SEQ ID NO: 1047 - protein, 413 aa, Anagallis arvensis
  unsure (1)..(413): unsure at all Xaa locations
RAEPMSATKGLTRGMEVIDTGAALSVPVGGATLGRIFNVLGEPVDNLGPVDTRTTSPIHRSAPAFIQLDTKLSIFETGIKVVDLLAPYRRGGKIGLFGGAGVGKTVLIMELITNIAKAHGGVSVFGGVGERTREGNDLYMEMKESGVINEENIAESKVALVYGQMNEPPGARMRVGLTALTMAEYFRDVNEQDVLLFIDNIFRFVQAGSEVSALLGRMPSAVGYQPTLSTEMGSLQERITSTKEGSITSIQAVYVPADDLTDPAPATTFAHLDATTVLSRGLAAKGIYPAVDPLDSTSTMLQPRIVGEEHYEIAQRVKQTLQRYKELQDIIAILGLDELSEEDRLTVARARKIERFLSQPFFVAEVFTGSPGKYVGLAPXIRGFQLILSGEFDGLPEQAFYLVGNIDEAAAKA

SEQ ID NO: 1048 - protein, 245 aa, Sulfolobus solfataricus
MEMGKMLVVYMTLGYPNVQSFKDFIIGAVENGADILELGIPPKYAKYDGPVIRKSYDKVKGLDIWPLIEDIRKDVGVPIIALTYLEDWVDQLENFLNMIKDVKLDGILFPDLLIDYIDDLDKIDGIIKNKGLKNVIFTSPSVPDLLIHKVSKISDLFLYYGVRPTTGVPIPVSVKQLINRVRNLVENKLIVGFGLSSESDLRDALSAGADGIAIGTVFIEEIERNGVKSAINLVKKFRAILDEYK

SEQ ID NO: 1049 - protein, 490 aa, Embothrium coccineum
GPGVSALEEKNLGRIAQIIGPVLDVAFPPGKMPNIYNALVVKGRDTVGQQINVTCEVQQLLGNNRVRAVAMSATDGLMRGMEVIDTGAPLSVPVGGATLGRIFNVLGEPVDNLGPVDTRTTSPIHRSAPAFIQLDTKLSIFETGIKVVDLLAPYRRGGKIGLFGGAGVGKTVLIMELINNIAKAHGGVSVFGGVGERTREGNDLYMEMKESGVINEQNITESKVALVYGQMNEPPGARMRVGLTALTMAEYFRDVNEQDVLLFIDNIFRFVQAGSEVSALLGRMPSAVGYQPTLSTEMGSLQERITSTKEGSITSIQAVYVPADDLTDPAPATTFAHLDATTVLSRGLAAKGIYPAVDPLDSTSTMLQPRIVGEEHYEIAQRVKQTLQRYKELQDIIAILGLDELSEEDRLTVARARKIERFLSQPFFVAEVFTGSPGKYVGLAETIRGFQLILSGELDGLPEQAFYLVGNIDEATAKAMNLEVESNLKK

SEQ ID NO: 1050 - protein, 298 aa, Saccharomyces bayanus
  unsure (1)..(298): unsure at all Xaa locations
MSRLERLTSLNVVAGSDLRRTAIIGTIGPKTNNPETLVALRKAGLNIVRMNFSHGSYEYHKSVVDNARKSEELYPGRPLAIALDTKGPEIRTGTTTNDVDYPIPPNHEMIFSTDDKYAKACDDKVMFVDYKNITKVISAGKIIYVDDGVLSFEVLEVVDDKTLKVKAMNAGKICSHKGVNLPGTDVDLPALSEKDKEDLRFGVRNGVHMVFASFIRTANDVLTIREVLGEQGKDVKIIVKIENQQGVNNFDEILKVTDGVMVARGDLGIEIPAPEVLAVQXKLIAKSNLAGKPVICAT

SEQ ID NO: 1051 - protein, 410 aa, Streptococcus pneumoniae TIGR4
MSTNRKNDMMVYCSFCGKNQEEVQKIIAGNNAFICNECVELAQEIIREELVEEVLADLSEVPKPIELLHILNHYVIGQDRAKRALAVAVYNHYKRINFHDTREESEDVDLQKSNILMIGPTGSGKTFLAQTLAKSLNVPFAIADATALTEAGYVGEDVENILLKLLQVADFNIERAERGIIYVDEIDKIAKKSENVSITRDVSGEGVQQALLKIIEGTVASVPPQGGRKHPQQEMIQVDTKNILFIVGGAFDGIEEIVKQRLGEKVIGFGQNNKAIDENSSYMQEIIAEDIQKFGIIPELIGRLPVFAALEQLTVDDLVRILKEPRNALVKQYQTLLSYDDVELEFDDEALQEIANKAIERKTGARGLRSIIEETMLDVMFEVPSQENVKLVRITKETVDGTDKPILETA

SEQ ID NO: 1052 - protein, 498 aa, Montinia caryophyllacea
MRINPTTSGSGVSTLEKQTLGRIVQIIGPVLDVAFPPGKMPNIYNALVVKGRDSAGQPINVTCEVQQLLGNNRVRAVAMSATDGLTRGMEVIDMGAAISVPVGGATLGRIFNVLGEPVDNLGPVDTSTTSPIHRSAPAFIQLDTKLAIFETGIKVVDLLAPYRRGGKIGLFGGAGVGKTVLIMELINNIAKAHGGVSVFGGVGERTREGNDLYMEMKESGVINEENIAESKVALVYGQMNEPPGARMRVGLTALTMAEYFRDVNEQDVLLFIDNIFRFVQAGSEVSALLGRMPSAVGYQPTLSTEMGSLQERITSTKEGSITSIQAVYVPADDLTDPAPATTFAHLDATTVLSRGLAAKGIYPAVDPLDSTSTMLQPRIVGEEHYETAQRVKETLQRYKELQDIIAILGLDELSEEDRLTVARARKIERFLSQPFFVAEVFTGSPGKYVGLAETIRGFQLILSGELDSFPEQAFYLVGNIDEATAKAMNLEMESNLKK

SEQ ID NO: 1053 - protein, 253 aa, Chlamydia trachomatis
MSKLTQVFKQTKPCIGYLTAGDGGTSYTIEAAKALIRGGVDILELGFPFSDPVADNPEIQVSHDRALAENLTSETLLEIVEGIRAFNQEVPLILYSYYNPLLQRDLDYLRRLKDVGINGVCVIDLPAPLSHGEKSPFFEDLLAVGLDPILLISAGTTPERMSLIQEYARGFLYYIPYQATRDSEVGIKEEFRKVREHFDLPIVDRRDICDKKEAAHVLNYSDGFIVKTAFVHQTTMDSSVETLTALAQTVIPG

SEQ ID NO: 1054 - protein, 481 aa, Utricularia biflora
  unsure (1)..(481): unsure at all Xaa locations
GXSTVEKKNXGRXVQFIGPVIDVAFLPGKMPNIYNALIVQGRATVGEPINVTCEVQQLLGNNRVRAVAMSATDVLTRGMEVIDTGAPLSVPVGGATLGRIFNVLGEPIDNLGPVDTSTTSPIHRSAPAFIQLDTKLAIFETGIKVVDLLAPYRRGGKIGLFGGAGVGKTVLIMELINNIAKAHGGVSVFGGVGERTREGNDLYMEMKESGVINQENIAESKVALVYGQMNEPPGARMRVGLTALTMAEYFRDVNEQDVLLFIDNIFRFVQAGSEVSALLGRMPSAVGYQPTLSTEMGSLQERITSTKEGSITSIQAVYVPADDLTDPAPATTFAHLDATTVLSRGLAAKGIYPAVDPLDSTSTMLQPRIVGEEHYETAQRVKQTLQRYKELQDIIAILGLDELSEEDRLTVARARKIERFLSQPFFVAEVFTGSPGKYVGLVETIRGFQLILAGELDGLPEQAFYLVGNIDEATTKGIKLE

SEQ ID NO: 1055 - protein, 420 aa, Staphylococcus epidermidis ATCC 12228
MFKFNEDEENLKCSFCGKDQDQVKKLVAGSGVYICNECIELCSEIVEEELAQNTSEGFTELPTPKEIMDHLNEYVIGQEKAKKSLAVAVYNHYKRIQQLGPNEDDVELQKSNIALIGPTGSGKTLLAQTLAKTLNVPFAIADATSLTEAGYVGDDVENILLRLIQAADFDIDKAEKGIIYVDEIDKIARKSENTSITRDVSGEGVQQALLKILEGTTASVPPQGGRKHPNQELIQIDTTNILFILGGAFDGIDEVIKRRLGEKVIGFASNEADKYDEEALLEQIRPEDLQSYGLIPEFIGRVPIVANLETLDVAALKNILTQPKNALVKQYTKMLELDNVELEFSEEALSAISEKAIERKTGARGLRSIIEEALIDIMYDVPSSENVSKVVITEQTINEEIEPELYDDEGNLINKNKTSA

SEQ ID NO: 1056 - protein, 576 aa, Arabidopsis thaliana
MLEKVETFDMNRVIDEFDEMTRNAHQVQKQTLKEILLKNQSAIYLQNCGLNGNATDPEEAFKSMVPLVTDVELEPYIKRMVDGDTSPILTGHPVPAISLSSGTSQGRPKFIPFTDELMENTLQLFRTAFAFRNRYNFPIDDNGKALQFIFSSKQYISTGGVPVGTATTNVYRNPNFKAGMKSITSPSCSPDEVIFSPDVHQALYCHLLSGILFRDQVQYVFAVFAHGLVHAFRTFEQVWEEIVTDIKDGVLSNRITVPSVRTAMSKLLTPNPELAETIRTKCMSLSNWYGLIPALFPNAKYVYGIMTGSMEPYVPKLRHYAGDLPLVSHDYGSSEGWIAANVTPRLSPEEATFAVIPNLGYFEFLPVSETGEGEEKPVGLTQVKIGEEYEVVITNYAGLYRYRLGDVVKVIGFYNNTPQLKFICRRNLILSINIDKNTERDLQLSVESAAKRLSEEKIEVIDFSSYIDVSTDPGHYAIFWEISGETNEDVLQDCCNCLDRAFIDAGYVSSRKCKTIGALELRVVAKGTFRKIQEHFLGLGSSAGQFKMPRCVKPSNAKVLQILCENVVSSYFSTAF

SEQ ID NO: 1057 - protein, 423 aa, Salmonella typhimurium LT2
MTDKRKDGSGKLLYCSFCGKSQHEVRKLIAGPSVYICDECVDLCNDIIREEIKEVAPHRERSALPTPHEIRTHLDDYVIGQEQAKKVLAVAVYNHYKRLRNGDTSNGVELGKSNILLIGPTGSGKTLLAETLARLLDVPFTMADATTLTEAGYVGEDVENIIQKLLQKCDYDVQKAQRGIVYIDEIDKISRKSDNPSITRDVSGEGVQQALLKLIEGTVAAVPPQGGRKHPQQEFLQVDTSKILFICGGAFAGLDKVIANRVETGSGIGFGATVKAKSDKASEGELLSQVEPEDLIKFGLIPEFIGRLPVVATLNELSEEALIQILKEPKNALTKQYQALFNLEGVDLEFRDEALDAIARKAMARKTGARGLRSIVEAALLDTMYDLPSMEDVEKVVIDESVIAGQSKPLLIYGKPEAQASGE

SEQ ID NO: 1058 - protein, 592 aa, Clostridium tetani E88
MVLLDSLVGTIVGINGPVIKAEGMSKFKMREMVMVGKKKLIGEIIILENDLATIQVYEETSGLKIGENISSTGMPLSLKLGPGIIGNMFDGIQRPLKKINEISYGFIDEGIGLISIDEEKEWDVNIVVKVGDKLKPGDVYAEVQETNIIKHRIMVPQDVNGEVTKVKESGKYNIEEKIVTVKDGGNIYELNLYQRWPVRTPRPIKNRLSLGKPLITGQRILDMFFPIAKGGTVAIPGGFGTGKTMTQHQLAKWSDADIIVYIGCGERGNEMTEVLEDFPKLIDPKTNTSLMNRTVLIANTSNMPVAAREASIYTGITIAEYYRDMGYDVAIMADSTSRWAEALREISGRLEEMPAEEGYPAYLPSRIAEFYERAGYVENLNDTEGSVTVIGAVSPAGADFSEPVTQNTKRFVGAFLGLDRKLAYARHYPAINWLTSYSQYNVMLTDWYLENISEDIIELRNKMLKILFEENKLQEIVKLVGEDVLPDDQRLILEVARILKVGFLQQNAYHDEDTYVPKEKQYKMLKAIELFYDNAYKCVKMGIPISKIRNEEIFGDLIKMKYNIPNEDISGIKVIEEKISSYYEELIEQYRK

SEQ ID NO: 1059 - protein, 1108 aa, Arabidopsis thaliana
MSPAAVEIGSPVEKVSSVLNPMENFSAFFPESVHSHDQRTMGSSFSFGFGAGSGQTTKTRHKPRLVKLRKNGREVKKPSFSGEILSGFNPFAPPGKGSLHMNSGNDRDAGQSPGDKCFVFGASGNSSGAKSSPGNATIASLSDEEEFSTPIGDSELDSESIKEHSNGVRGKVDNDRENIRPCSESTIFDATNGFRFDGGVNGSWKSVENPDAVKEFFRRQNGMDKASASKSCSKSNSVQYAHGKNRDDPELNLLADMEKLNISDSRVHGGSDYEEASKSNKTPVFTFSSFGKVDPICKEGAATSEPYSFSSNGFQQSNNASGENPTFHSQTTYGNNLTNTSFATKTFFDDFKVPEWDPSLLKDSLFPEVDRNPVHARSNRSSKDKRSKKVKEKMKQGEPDRCNGQTAEGIEAQEKLNSPGYCSPMDYSPYQGDKTSNQFPTETPLAPSHSREHIDSRSSNDFKVASARDSSLFTAEDHGSTCIPNFSFSASTSQETIRHKKLQAVKKYRRKVNNSLPKSNLNATMRNNQENQPVNTGQAKQDSGSTSMMPDVCEVWRLRGNQAYKNGYMSKAEECYTHGINSSPSKDNSEYSVKPLALCYGNRAAARISLGRLREAISDCEMAASLDPSYIKAYMRAANCHLVLGELGSAVQYFNKCMKSTSSVCLDRRTTIEAAEGLQQAQRVADFTSCASIFLEKRTPDGASDALVPIANALSISSCSDKLLQMKAEALFMIRRYKEVIELCENTLQTAERNFVSAGIGGTTNVNGLGSTYHSLIVWRWNKISKSHFYLGNLEKALDILEKLQQVEYTCNENQEECRESPASLVATISELLRYKNAGNEAVWDRKYMEAVEQYTAALSRNVDSRPFAAICFCNRAAANQALVQIADAIADCSLAMALDENYTKAVSRRATLHEMIRDYDQAASDLQRLISILVKQSDKTKTPETSVDRASSRKELKQARQRLSVMEEKSKEGIHLDFFLIMGVKTSDSAADIKKAYRKAALRHHPDKAAQILVRSESEGPWLKEILEEVHKGADRLFKMIGEAYSVLSDPTKRSDYELEEEIRKARASRESYRSRKAAEASSPPYQTSRRYWKDSWRTNQNTPSWW

SEQ ID NO: 1060 - protein, 263 aa, Rhodobacter sphaeroides
MTRIDDTFRRLRAEGKKAFVAYIMAGDPDLETSLAVMRGLPEAGVDIIELGMPFTDPMADGPTIQTAGQRALEGGQTLTRTLEMVRAFRAENAETPIVMMGYYNPIYARGVETFLAEATEAGIDGLIVVDLPPEEDAELCLPAQAAGLNFIRLATPTTDSRRLPKVLQNTSGFVYYVSITGITGAAAAQAADVAPEVARIKAATDLPVIVGFGITTPEAAQDLAGIADGCVVGSAIVKLVGEGRPVAEVLDRVAALAAGAHAA

SEQ ID NO: 1061 - protein, 114 aa, Elaeis guineensis
TGYAFVYFEDEHDAEDAIRGPDDIPFGYSRRRLSVKWSRQGERGPRHGFRSMTNMRPTKTLFVINFDPIRTRVRDIERHFEPYGKILNVQIRRNFAFVQFETQEEATKALECQI

SEQ ID NO: 1062 - protein, 401 aa, Coleochaete divergens
LGDNKVRAVSMSATDGLMRGMDVIDTGAPLSVPVGEATLGRIFNVLGEPVDELGPVDSTITLPIHRSAPAFTQLDTKLSIFETGIKVVDLLAPYRRGGKIGLFGGAGVGKTVLIMELINNIAKAHGGVSVFGGVGERTREGNDLYMEMKESKVINEENISESKVALVYGQMNEPPGARMRVGLTALTMAEYFRDVNKQDVLLFIDNIFRFVQAGSEVSALLGRMPSAVGYQPTLSTEMGTLQERITSTKEGSITSIQAVYVPADDLTDPAPATTFAHLDATTVLSRGLAAKGIYPAVDPLDSTSTMLQPWIVGQEHYETAQGVKQTLQRYKELQDIIAILGLDELSEEDRLTVARARKIERFLSQPFFVAEVFTGSPGKYVSLIETIKGFQLILSGDLDAL

SEQ ID NO: 1063 - protein, 424 aa, Mesorhizobium loti
MSKVGNNSGDSKNTLYCSFCGKSQHEVRKLIAGPTVFICDECVELCMDIIREENKTSMVKSREGVPTPQEILKVLDDYVIGQPYAKRVLSVAVHNHYKRLAHAGKNNDVELAKSNILLIGPTGCGKTLLAQTLARIIDVPFTMADATTLTEAGYVGEDVENIILKLLQSADYNVERAQRGIVYIDEIDKISRKSDNPSITRDVSGEGVQQALLKIMEGTVASVPPQGGRKHPQQEFLQVDTANILFICGGAFAGLDKIISDRGRKTSIGFGATVASPEDRRTGDIFRQVEPEDLLKFGLIPEFVGRLPVLATLEDLDEPALIQILTEPKNALVKQYQRLFEMENVDLTFHENALSAIAKRAIERKTGARGLRSIMEAILLDTMFELPALEGVREVVISEEVVTGSARPLYIYSEQKEKKGNVSA

SEQ ID NO: 1064 - protein, 491 aa, Spathiphyllum wallisii
  unsure (1)..(491): unsure at all Xaa locations
RSNPTTSXXAVSTXEEKXXGRIXQIIGPVLDVAFPPGXXPYIYNALVVKGRDTXXQEIKVTCEVQQLLGNNRVRAVAMSATDGLMRGMEVIDTGAPLSVPVGGATLGRIFNVLGEPVDNLGPVDTRTTSPIHRSAPAFIQLDTKLSIFETGIKVVDLLAPYRRGGKIGLFGGAGVGKTVLIMELINNIAKAHGGVSVFGGVGERTREGNDLYMEMKESGVINEQNIAESKVALVYGQMNEPPGARMRVGLTALTMAEYFRDVNEQDVLLFIDNIFRFVQAGSEVSALLGRMPSAVGYQPTLSTEMGSLQERITSTKEGSITSIQAVYVPADDLTDPAPATTFAHLDATTVLSRGLAAKGIYPAVDPLDSTSTMLQPRIVGEEHYETAQKVKQTLQRYKELQDIIAILGLDELSEEDRLTVARARKIERFLSQPFFVAEVFTGSRGKYVGLAETIRGFQLILSGELDSLPEQAFYLVGNIDEATAKAMNLEV

SEQ ID NO: 1065 - protein, 481 aa, Vibrio cholerae
MSSTLRRTKIVATLGPSTESPEILEAIIRAGANVVRMNFSHGTAEDHKNRAQKVREIAAKLGRHVALLGDLQGPKIRVSTFKEGKIILNEGEHFILDAELAKGEGTQESVGIDYKKLPQDVCNDDILLLDDGRVQLQVMRVEGNKIHTKVLVGGPLSNNKGINKKGGGLSADALTEKDKNDIRLAAEIQVEYLAVSFPRNGEDMKFARRLAQESGLYARMVAKVERAETVSCDENIDDIVRASDVIMVARGDLGVEIGDPELIAVQKKLISRAKKLNRVVITATQMMESMISNPMPTRAEVMDVANAVLDGTDAVMLSGETAAGKYPVETVKAMAEVCIGAEKMIESNEQNYRIKSVFRTEEEAIAMSTIYAANHLEGVKAMVTLTESGRTALMTSRLNSVFPIFAMSANQATLNRCALLRGVIPFYFDTKQASGLEAAIAALDALKERNLLEEGDLVIITQGDIMGVEGSTNCMRILPVY

SEQ ID NO: 1066 - protein, 350 aa, Arabidopsis thaliana
MQIFSCFCCGKGFDRQKKVKTEPSWRIFSLKELHAATNSFNYDNKLGEGRFGSVYWGQLWDGSQIAVKRLKAWSSREEIDFAVEVEILARIRHKNLLSVRGYCAEGQERLIVYDYMPNLSLVSHLHGQHSSESLLDWTRRMNIAVSSAQAIAYLHHFATPRIVHGDVRASNVLLDSEFEARVTDFGYDKLMPDDGANKSTKGNNIGYLSPECIESGKESDMGDVYSFGVLLLELVTGKRPTERVNLTTKRGITEWVLPLVYERKFGEIVDQRLNGKYVEEELKRIVLVGLMCAQRESEKRPTMSEVVEMLMIESKEKMAQLEANPLFNGNNDGEVIDESSEIISEVRDHQ

SEQ ID NO: 1067 - protein, 228 aa, Glycine max
MSKPNCPTNCGSVTVPFPFGMTEDCSLDASFLVSCNRTSSSSHVLFLPQTNISVLNISLNGELQISWPVASDCYAERGKLVSQTFQDINLTTFQVSSNRNKFTVIGCDTLGVVVGIDSKGRNYTTGCVSLCNRLQDIETNGSCSGTGCYETSIPRGLSGFSYGSGSVVDFNLCGHAFLTDLVNFDKTTFPVGMDWVVKNQTCQEAMKKVSSYPCRAQNSTSKCYHSLV

SEQ ID NO: 1068 - protein, 481 aa, Sterculia apetala
  unsure (1)..(481): unsure at all Xaa locations
TLEKENLGXISQIIGPVLDVAFPPGKMPNIYNALVVKGRDTVGQQINVTCEVQQLLGNNRVRAVAMSATDGLMRGMEVIDTGAPLSVPVGGATLGRILNVLGEPVDNFGPVDTRTTSPIHKPAPAFIQLDTKLSIFETGIKVVDLLAPYRRGGKIGLFGGAGVXKTVLIMELINNIAKAHGGVSVFGGVGERTREGNDLYMEMKESGVINEQNLAESKVALVYGQMNEPPGARMRVGLTALTMAEYFRDVNEQDVLLFIDNIFRFVQAGSEVSALLGRMPSAVGYQPTLSTEMGSLQERITSTKEGSITSIQAVYVPADDLTDPAPATTFAHLDATTVLSRGLAAKGIYPAVDPLDSTSTMLQPRIVGEEHYETAQRVKQTLQRYKELQDIIAILGLDELSEEDRLTVARARKIERFLSQPFFVAEVFTGSPGKYVGLAETIRGFKLILSGELDGLPEQAFYLVGNIDEATAKATNLEMES

SEQ ID NO: 1069 - protein, 472 aa, Vibrio vulnificus CMCP6
MTTLGPSTDKDNVLEEIIRAGANVVRMNFSHGSAEDHKTRAEKVRNIAARLGRQVAILGDLQGPKIRVSTFKEGKIFLSVGDLFTLDSDLPKGEGDQKSVGLDYKALPQDVGPEDILLLDDGRVQLQVLTVDGNKVNTRVIVGGPLSNNKGINKKGGGLSADALTEKDKQDILLAAEIKVDYLAISFPRNGADMDYARRLARDAGLEAKLVAKVERAETVRNDENIDDIIMASDVIMVARGDLGVEIGDPELIGVQKKLIKRAKELNRVVITATQMMESMIENPMPTRAEVMDVANAVLDGTDAVMLSGETAAGKYPVETVRSMAEVCIGAEKTWEPGSQNYRIDKSFVTAEETIAMSTIYAANHMEGVKAMVTLTESGRTALMTSRLNSTLPIFALSPNERTLNRCSLYRGVTPVFFDTKVETGFDVAMAALSTLRKKKLLDFGDLVIITQGDIMDVEGSTNCMRILPVFD

SEQ ID NO: 1070 - protein, 438 aa, Rhodococcus fascians
MSGIWHTDDVHLTSAGADFGNCIHAKPPVVVVPRTVADVQEALRYTAARNLSLAVRGSGHSTYGQCQADGGVVLDMKRFNTVHDVRSGQATIDAGVRWSDVVAATLSRQQTPPVLTDYLGTTVGGTLSVGGFGGSSHGFGLQTDNVDSLAVVTGSGDFRECSAVSNSELFDAVRGGLGQFGVIVNATIRLTAAHESVRQYKLQYSNLGVFLGDQLRAMSNRLFDHVQGRIRVDADGHLRYRLDLAKYFTPPRRPDDDALLSSLQYDSCAEYNSDVDYGDFINRMADQELDLRHTGEWFYPHPWASLLIPADKIEQFIETTSSSLTDDLGNSGLIMVYPIPTTPITAPFIPIPHCDTFFMLAVLRTASPGAEARMIASNRLLYEQARDVGGVAYAVNAVPMSPGDWCTHFGSRWQAIARAKRRFDPYRILAPGYRMSFD

SEQ ID NO: 1071 - protein, 268 aa, Yersinia pestis CO92
MERYQQLFKQLAAKKEGAFVPFVQLGDPSPAMSLNIIDTLIAAGADALELGIPFSDPLADGPTIQNAALRAFAAGVTPGICFEILAEIRQKHPTIPIGLLMYANLVFHNGIDHFYQRCAEVGVDSVLIADVPFEESAPFRAAALRHGIAPIFICPPNADDDLLREIASHGRGYTYLLSRAGVTGAENHGQLPLNHLVDKLREYNAAPALQGFGISEPAQVKASLAAGAAGAISGSAIVKIIEKNVAQPVEMLVQLTRFVTEMKAATRS

SEQ ID NO: 1072 - protein, 505 aa, Arabidopsis thaliana
MLTNYVPVYVMLQLGVITNDNVLENEESLKKQLKKLKQSQVDGVMVDVWWGIVESKGPKQYQWSAYRNLFAIVQSFGLKLQAIMSFHRCGGNIGDDVNIPIPKWVLEIGDSNPDIFYTNKSGNRNKECLSLSVDNLSLFRGRTAVEMYRDYMKSFRENMEDFISSGVIIDIEVGLGPAGELRYPSYSETQGWVFPGIGEFQCYDKYLRSDYEEEVRRIGHPEWKLPENAGEYNSVPGETEFFEYSNGTYLKEEGNFFLSWYSKKLLLHGDQILDEANKVFLGCKLKIAAKVSGIHWWYKTESHAAELTAGYYNLKNRDGYRAIAKIMRRHHAILNFTCLEMKNTEQPAKAKSGPQELVQQVLSSGWREGIEVAGENALPRFDRNGYNQIILNARPNGVNQDGKPRMFGFTYLRLSDKLLNEPNFSTFKMFLKRMHANQEYCSEPERYNHELLPLERSRNDESLEMFMEETEPFDPFPWLDETDMSIRPFESVLSLLRSTFLRKKS

SEQ ID NO: 1073 - protein, 484 aa, Neurada procumbens
  unsure (1)..(484): unsure at all Xaa locations
XGYQSLGRISQIIGPVLDVAFPPGKMPNIYNALVVKGRDTTGQQINVTCEVQQLLGNNRVRAVAMSATDGLTRGMEVIDTGAPLSVPVGGATLGRIFNVLGEPVDNLGPVDTRTTSPIHKSAPAFIQLDTKLSIFETGIKVVDLLAPYRRGGKIGLFGGAGVGKTVLIMELINNIAKAHGGVSVFGGVGERTREGNDLYMEMKESGVINEQNIAESKVALVYGQMNEPPGARMRVGLTALTMAEYFRDVNEQDVLLFIDNIFRFVQAGSEVSALLGRMPSAVGYQPTLSTEMGTLQERITSTKEGSITSIQAVYVPADDLTDPAPATTFAHLDATTVLSRGLAAKGIYPAVDPLDSTSTMLQPRIVGEDHYETAQRVKQTLQRYKELQDIIAILGLDELSEEDRLTVARARKIERFLSQPFFVAEVFTGSPGKYVGLAETIRGFKLILSGELDGLPEQAFYLVGNIDEATAKATNLEMESXLKK

SEQ ID NO: 1074 - protein, 357 aa, Arabidopsis thaliana
MKPVFCGNFEYDARESDLERLFRKYGKVERVDMKAGFAFVYMEDERDAEDAIRALDRFEYGRTGRRLRVEWTKNDRGGAGRSGGSRRSSSGLRPSKTLFVINFDAQNTRTRDLERHFEPYGKIVNVRIRRNFAFIQYEAQEDATRALDATNSSKLMDKVISVEYAVKDDDSRGNGYSPERRRDRSPDRRRRSPSPYRRERGSPDYGRGASPVAHKRERTSPDYGRGRRSPSPYKRARLSPDYKRDDRRRERVASPENGAVRNRSPRKGRGESRSPPPYEKRRESRSPPPYEKRRESRSPPPYEKRRERSRSRSKSSPENGQVESPGQIMEVEAGRGYDGADSPIRESSPSRSPPAEE

SEQ ID NO: 1075 - protein, 486 aa, Heisteria parvifolia
  unsure (1)..(486): unsure at all Xaa locations
PTTSGXGVSTLEKKNLGRIAQIIGPVLDVAFFPGKMLNIYNALVVXGRDTVGQPINVTCEVQQLLGNNRVRAVAMSATDGLMRGMEVIDTGAPLSVPVGGATLGRIFNVLGEPVDNLGPVDTRTTSPIHRSAPAFIQLDTKLSIFETGIKVVDLLAPYRRGGKIGLFGGAGVGKTVLIMELINNIAKAHGGVSVFGGVGERTREGNDLYMEMKESGVINEQNIAESKVALVYGQMNEPPGARMRVGXTALTMAEYFRDVNEQDVLLFIDNIFRFVQAGSEVSALLGRMPSAVGYQPTLSTEMGSLQERITSTKEGSITSIQAVYVPADDLTDPAPATTFAHLDATTVLSRGLAAKGIYPAVDPLDSTSTMLQPRIVGEEHYETAQRVKQTLQRYKELQDIIAILGLDELSEEDRLTVARARKIERFLSQPFFVAEVFTGSPGKYVGLTETIRGFQLILSGELDGLPEQAFYLVGNIDEATARAMNL

SEQ ID NO: 1076 - protein, 438 aa, Bacillus sphaericus
MRKTKIVCTIGPASESSETLEKLIEAGMNVARLNFSHGSHEEHAGRIHLIREVAQKLNKPVGILLDTKGPEIRTHNMKNGELHLTAGQVIDISMTEVEGTETSFSVTYEQLVEDVEQNSIILLDDGLIQLRVLATDVEKGLIHTIVENAGVLKNKKGVNVPGVSVQLPGITEKDAQDILFGIEQGVDFIAASFVRRAKDVLEIRELLEQNGGGHIQIIPKIENQEGVDNIDEIILVSDGLMVARGDLGVEIPAEEVPLVQKKLILKCNQVGKPVITATQMLDSMQRNPRPTRAEASDVANAIIDGTDAIMLSGETGAGLYPVESVQTMNKIAQRTENSLDYKSIVSTRSREKEANMTEAISQAVAYTSINLGVKAVLAPTESGNTARMIAKYRPGVPIVAVTGSTNTAQTLTLVWGVHPIVCQRVTTTDEILELAVDE

SEQ ID NO: 1077 - protein, 224 aa, Sinorhizobium meliloti
MTMVGHASRLVIFDCDGVLVDSEPISLGVLVDALAAAGVSMTAEEASERFLGRSLKTMSTILHEEHGLATDEVFLEGMRTRLYARFREELRPIARIREAVEGLGTAHCVASSSQPERIRLSLTVTGLIDLFEPNIFSASMVARGKPAPDLFLHASAEMGYHPSDCIVIEDSPAGIEAAKSAGMRVFAFAGGSHARNDRHRRTLASLEPDVLFDDMGELIQFVRQ

SEQ ID NO: 1078 - protein, 487 aa, Glycine max
MVEKDGVGSKYLQQTLNVSIDMHQHGISKCFDDDGRPKRTGTVWTSSAHIITAVIGSGVLSLAWAIAQLGWIAGPIVMVIFSAITYYTSTLLADCYRTGDPVTGKRNYTYMDAIQSNFGGNGFKVKLCGLVQYVNLFGVAIGYTIAASTSMMAIERSNCFHKSGGKDPCHINSNMYMISFGIVEILFSQIPGFDQLWWLSIVAAVMSFTYSTIGLGLGIGKVIENGGVGGSLTGITIGTVTQTDKVWRTMQALGDIAFAYSYSLILIEIQDTVKSPPSESKTMKKASFISVAVTSIFYMLCGCFGYAAFGDASPGNLLTGFGFYNPYWLLDIANAAIVIHLVGSYQVYCQPLFAFVEKHAAQMFPDSDFLNKEIEIPIPGFHPYRLNLFRLVWRTIYVMLSTVISMLLPFFNDIGGLLGAFGFWPLTVYFPVEMYIIQKRIPKWSTKWICLQILSMTCLLMTIGAAAGSIAGIAIDLRTYKPFKTNY

SEQ ID NO: 1079 - protein, 456 aa, Simarouba glauca
  unsure (1)..(456): unsure at all Xaa locations
IGPVLDVAFLPGKMPNIYNALVVKGRXTVGQPINMTCEVQQLLGNNRVXAVAMXATDGLTRGMEXIDTGAPLXVPVGGATLGXIFNVLGEPVDNLGPVXTRTTSPIHKPAPAFIQLDTKLSIFETGIKVVXLLAPYRRGGKIGLFGGAGVGKTVLIMELINNIAKAHGGVSIFGGVGERTREGNDLYMEMKESGVINEQNIAESKVALVYGQMNEPPGARMRVGLTALTMAEYFRDVNEQDVLLFIDNIFRFVQAGSEVSALLGRMPSAVGYQPTLSTEMGSLQERITSTKEGSITSIQAVYVPADDLTDPAPATTFAHLDATTVLSRGLAAKGIYPAVDPLDSTSTMLQPRIVGEEHYETAQRVKQTLQRYKELQDIIAILGLDELSEEDRLTVARARKIERFLSQPFFVAEVFTGSPGKYVGLAETVRGFKLILSGELDGLPEQAFYLVGNIDE

SEQ ID NO: 1080 - protein, 373 aa, Glycine max
MASSDPISSRHYTYNRKQKSLGLLCTNFLSLYNRDTVHLIGLDDAATRLGVERRRIYDIVNVLESIGVLSRKAKNQYTWRGFAAIPLTLQDLKEEGLKENSNSLRGPGNHDKVSDDEDDEETQSNPAATGSQSDKLNPNSTLPKPLKNENRREKSLALLTQNFVKLFVCSNVELISLDEAAKLLLGDAHNTSVMRTKVRRLYDIANVLSSMNLIEKTHTMDTRKPAFRWLGSEGKTWDETLHKSNLNDSRKRAFGSDITNISFERNKVELFTSGDLNPNPKKPRMENGSGLGEADENNLKQGIKQASKSYEFGPFAPACVPKVGASQNNNMKQVHDWGSLATAHSPQYQNEASPSLLQQGHCTVKASSCASFV

SEQ ID NO: 1081 - protein, 959 aa, Arabidopsis thaliana
MCEPDDNSARNGVTTQPSRSRELLMDVDDLDLDGSWPLDQIPYLSSSNRMISPIFVSSSSEQPCSPLWAFSDGGGNGFHHATSGGDDEKISSVSGVPSFRLAEYPLFLPYSSPSAAENTTEKHNSFQFPSPLMSLVPPENTDNYCVIKERMTQALRYFKESTEQHVLAQVWAPVRKNGRDLLTTLGQPFVLNPNGNGLNQYRMISLTYMFSVDSESDVELGLPGRVFRQKLPEWTPNVQYYSSKEFSRLDHALHYNVRGTLALPVFNPSGQSCIGVVELIMTSEKIHYAPEVDKVCKALEAVNLKSSEILDHQTTQICNESRQNALAEILEVLTVVCETHNLPLAQTWVPCQHGSVLANGGGLKKNCTSFDGSCMGQICMSTTDMACYVVDAHVWGFRDACLEHHLQKGQGVAGRAFLNGGSCFCRDITKFCKTQYPLVHYALMFKLTTCFAISLQSSYTGDDSYILEFFLPSSITDDQEQDLLLGSILVTMKEHFQSLRVASGVDFGEDDDKLSFEIIQALPDEKVHSKIESIRVPFSGFKSNATETMLIPQPVVQSSDPVNEKINVATVNGVVKEKKKTEKKRGKTEKTISLDVLQQYFTGSLKDAAKSLGVCPTTMKRICRQHGISRWPSRKIKKVNRSITKLKRVIESVQGTDGGLDLTSMAVSSIPWTHGQTSAQPLNSPNGSKPPELPNTNNSPNHWSSDHSPNEPNGSPELPPSNGHKRSRTVDESAGTPTSHGSCDGNQLDEPKVPNQDPLFTVGGSPGLLFPPYSRDHDVSAASFAMPNRLLGSIDHFRGMLIEDAGSSKDLRNLCPTAAFDDKFQDTNWMNNDNNSNNNLYAPPKEEAIANVACEPSGSEMRTVTIKASYKDDIIRFRISSGSGIMELKDEVAKRLKVDAGTFDIKYLDDDNEWVLIACDADLQECLEIPRSSRTKIVRLLVHDVTTNLGSSCESTGEL

SEQ ID NO: 1082 - protein, 476 aa, Caulobacter crescentus CB15
MIRARRSRIVATLGPASSSFDMIVTLAKAGADVFRLNFSHGAHETHAAVYAAIREAEKVVNRPLGVLADLQGPKLRVGKFADGPVMLKAGQAFRFDSDPAPGDETRVHLPHPEILTAMRPGATLLLDDGKLRMTVTDAGPGYANTKVVNSGKLSERKGVAVPDVVIPMSPLTAKDREDLAFALRLGVDWVALSFVQAPEDMAELRRIVEGRAAVLAKIEKPQALKVLGPILDLCDGVMVARGDLGVEMAPEEVPVAQKEILRAARERGIPVIVATQMLESMTSSPTPTRAEASDVANAVYEGADAVMLSAESAAGDYPEESVSMMNRIIERVERDPKWPELMYAEQSHDDVDADVLVVAAAGAAKSGSTKCLVAFTTTGATARRLSRERPLQPVLALSPEISAVRRMCLVWGVEPRVSAQPDSLEVVTTDASSKALELGLVAPGERLLVVAGTPFGAPGAANLLRLAHAPAPARRR

SEQ ID NO: 1083 - protein, 248 aa, Silene latifolia
MEFSSQITREEGSPSSQRKLGRGKIEIKRIENTTNRQVTFCKRRNGLLKKAYELSVLCDAEVALIVFSSRGRLYEYANHSVKGTIDRYKKASSDNSGASSAAEANAQYYQQEAAKLRNQIRTVTENNRHLMGEGLSSLNMKDLKSLENKLERGISRIRSKKNELLFAEIEFMQKREVELHNNNQYLRAKIAENERAQQSMSLMPGGSSEYELAPPPQSFDSRNYFQVNALQPNNTHYSRPDQTTLQLN

SEQ ID NO: 1084 - protein, 490 aa, Jacquemontia tamnifolia
MRINPTNSSSDVSAVEKKNLGRIVQIIGPVLDVAFPPGKMPNIYNALVVQGRDNEQTNVTCEVQQLLGNNRVRTVAMSDTDGLMRGMDVIDMGAPISVPVGGSTLGRIFNVLGEPVDNLGPVDTKITSPIHRSAPAFTQLDTKLSIFETGIKVVDLLAPYRRGGKIGLFGGAGVGKTVLIMELINNIAKAHGGVSVFGGVGERTREGNDLYMEMKESGVINEEKIAESKVALVYGQMNEPPGARMRVGLTALTMAEYFRDVNEQDVLLFIDNIFRFVQAGSEVSALLGRMPSAVGYQPTLSTEMGTLQERITSTKEGSITSIQAVYVPADDLTDPAPATTFAHLDATTVLSRGLAAKGIYPAVDPLDSTSTMLQPRIVGKEHYETAQRVKQTLQRYKELQDIIAILGLDELSEEDRLTVARARKIERFLSQPFFVAEVFTGSPGKYVGLVETIRGFQLILSGEFDSLPEQAFYLVGNIDEATAKAMNLKT

SEQ ID NO: 1085 - protein, 247 aa, Gnetum gnemon
MGRGKIEIKRIENTTNRQVTFCKRRNGLLKKAYELSVLCDAEVALIVFSSRGRLYEFANNSVKRTIERYRKTCADNNQGGAIAESNAQYWQQEAVKLKQQIDVLNNQIRHYMGECLQSMTIKELKQLEGKLEKGLGRVRSKRNEKLLEDIDTLQRREDNLIRENEYIRNKIAECQSHQHANMLTAAAVEYDAIPAAYDSRNFMHANLIEAAAAHHHYAQQEQTALHLGSEHKYSVHYPDPQAHKFQT

SEQ ID NO: 1086 - protein, 222 aa, Picea abies
MGRGKIEIKRIENTTNRQVTFCKRRNGLLKKAYELSVLCDAEVALIVFSSRGRLYEFANHSVKRTIERYKKTCVDNNHGGVISESNSQYWQQEAGKLRQQIEILQNANRHLMGDGLTALNIKELKQLEVRLEKGIGRVRSKKNEMLLEEIDIMQRREHILIQENEILRSKIAECQNSHNTNMLSAPEYDALPAFDSRNFLHANLIDAAHHYAHQEQTTLQLG

SEQ ID NO: 1087 - protein, 427 aa, Oryza sativa
  unsure (1)..(427): unsure at all Xaa locations
GGPCGISGGGGMYVPQPSRSDAGDAGDQPRVYQVWRGSNEFFLRGRFIFGPDVRSIFLTMFLIVAPVVAFCVFVARHLIDDFPGDWGISVMVVVVVFTVYDLTLLLLTSGRDPGIIPRNTHPPEPEGFDGSNDSGVQTPQQLRLPRTKDVIVNGISVRIKYCDTCMLYRPPRCSHCSICNNCVERFDHHCPWVGQCIGLRNYRFFYMFVFSTTLLCLYVFAFCWVYIIKIRNAESLSVWKAMLKTPASIVLIIYCFLCVWFVGGLSVFHCYLMSTNQTTYENFRYRYDRRANPYNRGVLNNFLEIFCSRIPPSKNNFRARVTVEQGLQPRVASRGFMSPNMGKPVGDLEMGRKPVPWDEPRTAADIRDLEAGLGGFLDEKEGRLTHASPDLSSPADLMKGRAGTHSRRSSWVNRSGNWERIPPLVCX

SEQ ID NO: 1088 - protein, 485 aa, Pleiospermium alatum
NPTTSGSGVSALANKNLRHIAQIIGPVMDVAFPPGKMPNIYNALVVKGRDTVDQPINVACEVQQLLGNNRVRAVAMSATDGLTRGMEVIDTGAPLSVPVGGVTLGRIFNVLGEPVDNLGPVDTRTTSPIHKSAPAFIQLDTRLSIFETGIKVVDLLAPYRRGGKIGLFGGAGVGKTVLIMELINNIAKAHGGVSVFGGVGERTREGNDLYMEMKESGVINDQNISESKVALVYGQMNEPPGARMRVGLTALTMAEYFRDVNEQDVLLFIDNIFRFVQAGSEVSALLGRMPSAVGYQPTLSTEMGSLQERITSTKEGSITSIQAVYVPADDLTDPAPATTFAHLDATTVLSRGLAAKGIYPAVDPLDSTSTMLQPRIVGEEHYETAQRVKQTLQRYKELQDIIAILGLDELSEEDRLTVARARKIERFLSQPFFVAEVFTGSPGKYVGLAETIRGFKLILSGELDGLPEQAFYLVGNIDEVTAKAT

SEQ ID NO: 1089 - protein, 281 aa, Picea mariana
AAGSGYWKATGADKPITAKGGKKRVGVKKALVFYVGKAPNGSKTNWLMHEYRVTNVSRPVKKKNSLILDDWVLCRIYNRRISAEKLALQQKESFNDVPMETIDEKEMENQLTSTSIEHSGIEQSNPSFDHLSKLGSSPTCYNSAPLCVSPMNSNICLQNLDFFQNSTTPFSDSTLKAPVQNTTFNPISSSINHQWTNCNSTDLMSGLHNDSSCSKPSSFSEPISEKEEVQSSFRLENFSQEQQQSLFNFGLEGLQNTFTHLDQITLPGAYQDWFYPNEPFH

SEQ ID NO: 1090 - protein, 279 aa, Prochlorococcus marinus subsp. pastoris str. CCMP1378
MKENKKTQFPINKTLSKINKKFLELKKSDKLALMPFIMAGDPNIETTSEILLKLQEKGADLIELGIPYSDPLADGPIIQLSASRALKSGTTLKNVIQLLESLKDKLHIPIILFTYFNPVLNFGLENFCELASKVGVSGLIIPDLPLEEAYKFSEIISSYSIDLILLVAPTTPSERMKIISNNTKGFTYLVSVTGVTGERNKMENRVENLITKLQEISINPVAVGFGISSPEHVNKVRKWGADGVIIGSAFVKRISNSNEKEVVNQIGKFCEEMRKAADQ

SEQ ID NO: 1091 - protein, 1098 aa, Oryza sativa
  unsure (1)..(1098): unsure at all Xaa locations
MAKAARRGVNPPSSASPSLTNPAIAARGGADPLSLACPSLTDPATAAGGGADRWSPTFPSLMHLAVGVAAVARLPLPHGSGGGGGMGRPPPSHESDDENDGGKLPGGGSKDPDLGSGMSAASNVGCATAPVSSSREKGRREELGGGGGGLVGRRSEHVDGGCSAKKAKKPPVMPPPAAFLFLACVLGASVAVAAAVAADGDGDAMRELRRALAPPDWGAAGEDGKGSYYCAWRGVTCAGGGGGAVVAIDLPRRGLRGDFSAVAGLRALARLDLSFNALRGGVPGEALGGLPGLEFLDLSMNHLSGGVPPSLAGAVGLRFLNLSNNALSGGIPDELRSLRALTELQISGNNLTGAIPPWLAALPALRILSAYENSLSGPIPSGLGLSSKLQVLNLHSNALEGAIPSSLFDLGNLQVLILTVNRLNGTIPDTIGRCSALSNVRIGNNRLAGAIPASIGDATSLTYFEADSNELTGGIPAQLARCANLTLLNLAYNRLAGEVPDVLGELRSLQELIVSSNGLSGEFPRSILRCRNLSKLDLSYNAFRGGLPESVCNGSRLQFLLLDHNEFSGGIPVGIGGCGRLLELQLGNNNLTGEIPAEIGRVKSLQIALNLSFNHLVGPLPRELGRLDKLVALDLSSNEISGEIPGDMRGMLSLIEVNLSNNRLSGAIPVFAPFQKSAASSFSGNTKLCGNPLVVDCGPIYGSSYGMDHRKISYRVALAVVGSCVLIFSVVSLVVALFMWRERQEKEAEAKMAEAGEVVVAAPQVMASNMFIDSLQQAIDFQSCVKATFKDANVVSNGTFSITYKAVMPSGMVVCVKKLKSVDRAVIHHQTKMIWELECLSHINHPNLVRPIGYVIYEDVALLLHHHMPNGTLLQLLHNVDNRDNQKPDWPRLLSIAIDVAEGLAFLHHVATIHLDISSGNVFLDSHYNALLGEVEISKLLDPLKGTASISAVAGSFGYIPPEYAYTMQVTVPGNVYSFGVVLLEILTSKLPVDEEFGEGMDLVKWVHSAPARGETPEQIMDPKLSTVSFAWRKQMLAVLKVAMLCTERAPAKRPKMKKVVEMLQEAKNSXGPRAGTAYPLAVKIAHETRSVNNNPVR

SEQ ID NO: 1092 - protein, 467 aa, Bacillus subtilis subsp. subtilis str. 168
MEKKPLTPRQIVDRLDQYIVGQQNAKKAVAVALRNRYRRSLLDEKLKDEVVPKNILMMGPTGVGKTEIARRIAKLSGAPFIKIEATKFTEVGYVGRDVESMVRDLVETSVRLIKEEKMNEVKEQAEENANKRIVRLLVPGKKKQSGVKNPFEMFFGGSQPNGEDEAESQEEANIEEKRKRMAHQLALGELEDYYVTVEVEEQQPSMFDMLQGSGMEQMGMNMQDALSGLMPKKKKRRKMTVREARKVLTNEEASKLIDMDEVGQEAVQRAEESGIIFIDEIDKIAKNGGASSSADVSREGVQRDILPIVEGSTVVTKYGSVKTDHVLFIAAGAFHMAKPSDLIPELQGRFPIRVELNKLTVDDFVRILVEPDNALLKQYQALLQTEGISLEFSDEAIHKIAEVAYHVNQDTDNIGARRLHTILERLLEDLSFEAPDVTMEKITITPQYVEEKLGTIAKNKDLSQFIL

SEQ ID NO: 1093 - protein, 268 aa, Pasteurella multocida
MRRFDTLFSQLQQKQQGAFVPFVTLCDPNLAQSFEIIQTLVENGADALELGFPFSDPMLDGPVIQAANQRALVAGCSTDASFQLLTQVRSTYPTLPISLLLCANLVYAQGIERFYQRCAEVGVDAVLIADLPLFAHREFTVMAEKYSIQQVFICPPNACEDTIKRVAQQTQGYTYLVSRSGVTGVENQQSADNLKTLVERLKAYQAPPILQGFGISQPQQVSDVLKIGVNGAISGSATVQIIEKYHHDPQACLAELAQFTQKMKQATT

SEQ ID NO: 1094 - protein, 490 aa, Orites lancifolia
  unsure (1)..(490): unsure at all Xaa locations
GXGVSALEEKNLGRIAQIIGPVLDVAFPPGKMPNIYNALVVKGRDTVGQQINVTCEVQQLLGNNRVRAVAMSATDGLMRGMEVIDTGAPLSVPVGGATLGRIFNVLGEPVDNLGPVDTRTTSPIHRSAPAFIQLDTKLSIFETGIKVVDLLAPYRRGGKIGLFGGAGVGKTVLIMELINNIAKAHGGVSVFGGVGERTREGNDLYMEMKESGVINEQNIAESKVALVYGQMNEPPGARMRVGLTALTMAEYFRDVNEQDVLLFIDNIFRFVQAGSEVSALLGRMPSAVGYQPTLSTEMGSLQERITSTKEGSITSIQAVYVPADDLTDPAPATTFAHLDATTVLSRGLAAKGIYPAVDPLDSTSTMLQPRIVGEEHYEIAQRVKQTLQRYKELQDIIAILGLDELSEEDRLTVARARKIERFLSQPFFVAEVFTGSPGKYVGLAETIRGFQLILSGELDGLPEQAFYLVGNIDEATAKAMNLEVESNLKK

SEQ ID NO: 1095 - protein, 221 aa, Caulobacter crescentus CB15
MSFPRRVEGVVFDMDGLLLDTEIVYRAAMIEAGQVFGIGFTGEIYAAMVGKTTPECGVMLRELFGETFPVQSYFERVWADVEDLLEAETRLKAGVIEILDFLDDQGLPRGIATSNGKPAVERYLGRFDLLPRFHAVVAHHDVVRHKPHPDPYLEAARRIGVDPAACLALEDSHPGVRAAHAAGMMTVMVPDILDPNEEMHDKCVHIADSLHHVLDLLKASA

SEQ ID NO: 1096 - protein, 484 aa, Ecdeiocolea monostachya
TSRPGVSAIEEKSTGSIDQIIGPVLDVTFPPGKLPYIYNALIVKSRNTAGKQINVTCEVQQLLGNNRVRTVAMSATDGLTRGMEVIDTGAPLSVPVGGATLGRIFNVLGEPVDSLGPVDTSATFPIHRSAPAFIELDTKLAIFETGIKVVDLLAPYRRGGKIGLFGGAGVGKTVLIMELINNIAKAHGGVSVFGGVGERTREGNDLYKEMKESGVINEKNLAESKVALVYGQMNEPPGARMRVGLTALTMAEYFRDVNKQNVLLFIDNIFRFVQAGSEVSALLGRMPSAVGYQPTLSTEMGSLQERITSTKEGSITSIQAVYVPADDLTDPAPATTFAHLDATTVLSRGLASKGIYPAVDPLDSTSTMLQPRIVGNEHYETAQSVKQTLQRYKELQDIIAILGLDELSEEDRLTVARARKIERFLSQPFFVAEVFTGSVGKYVRLAETIRGFQLILSGELDGLPEQAFYLVGNIDEASTKAINL

SEQ ID NO: 1097 - protein, 449 aa, SYNECHOCOCCUS SP. WH 8102
MAKFDAHLKCSFCGKSQDQVRKLIAGPGVYICDECIDLCNEILDEELVDSQGNRGQAADSSRKAAPAAKKSGKPAPTLASIPKPQQIKSFLDEQVVGQEAAKKVMSVAVYNHYKRLAWQGDGQGETEQTATRLHKSNILLIGPTGCGKTLLAQTLAEMLDVPFAVADATTLTEAGYVGEDVENILLRLLQKADMDVDQAQRGIIYIDEIDKIARKSENPSITRDVSGEGVQQALLKMLEGTVANVPPQGGRKHPYQDCIQIDTSQILFICGGAFVGLDEVVQKRMGRNAIGFMPTDGRGRSRANRELQTTQVLRHLEPDDLVKYGLIPEFIGRMPVSAVLEPLDESALESILTEPRDALVKQFRTLLSMDNVQLQFEPAAIHAIAQEAHRRKTGARALRGIVEELMLDLMYDLPSQSTVKEFTITQAMVEQHTGGKVLPLPGTEQQKTA

SEQ ID NO: 1098 - protein, 281 aa, Corynebacterium glutamicum
MSRYDDLFGDASTRSGEGAFVPFIMLSDPSPEEAFQIISTAIERGADALELGVPFSDPVADGPTVAESHLRALDGGATVDSALEQIKRVRAAYPEVPIGMLIYGNVPFTRGLDRFYQEFAEAGADSILLPDVPVREGAPFSAAAGIDPIYIAPANASEKTLEGVSAASKGYIYAISRDGVTGTERESSTDGLSAVVDNIKKFDGAPILLGFGISSPQHVADAIAAGASGAITGSAITKIIASHCEGEHPNPSTIRDMDGLKKDLTEFISATEGSDQEGLGL

SEQ ID NO: 1099 - protein, 1129 aa, Mesotaenium caldariorum
MESSTGLVAGSRNRNQFVVIPADEEQRRNVTTPAASVCQICGDDVGLSATGELFVACVECGYPVCRPCYEYERKEGSKACPQCKTVYKRLKGSPRVPTDEEDDDIEDLENEFRGHSHVAHKSHDQHDHDHLDDVESVRSGRNTHDPYATYEPYRVQPQVPLLTDAHYETGSEYGGHTTNSDYGGHGVGSDYGGKTNPSEYSHHHHSHHQAIMVPGGQPGSDAGVHAGSFVNGDGISAKSADPKDPASFGYGSIAWKDRVDAWKQRQDKMQMTTAPGGVLVDANKGGPGGPEDPYNGGNDLPLMDESRQPLSRKVDFNMGLIQPYRLMIVIRLVVLAFFLRYRILNPAPSRPLWMTSVICEIWFAVSWILDQFPKWMPINRETYLDRLNLRFEKEGEPSQLQAVDLFVSTVDPEKEPPLTTANTLLSILSIDYPVDKVSCYLSDDGAAMLTFEALSETSEFARRWVPFVKKYNIEPRAPEMYFSQKIDYLKDKIQPSFVKERRIMKREYEEFKVRINALVSKSMKVPEDGWTMQDGTPWPGNNSRDHPGMIQVFLGPSGGLDTDGNALPRLVYVSREKRPGFNHHKKAGAMNALIRVSAVLTNAPYILNLDCDHYVNNSKALRHAMCFMMDPNVGKKVCYVQFPQRFDGIDRSDRYANHNTVFFDINLRGLDGLQGPVYVGTGCCFRRHALYGYEPKKKESSRGCCSMVFCGCCGLCGRKKEKSAVDNPLKTGKFKGSDPSLPMYNIDDLEDGDGQERESLVALKQFEKRFGQSPVFVLSTFHEEGGSVASSSASSTLKEAIHVISCGYEDKTEWGKEVGWIYGSVTEDILTGFKMHCRGWRSIYCMPKIAAFKGSAPINLSDRLQQVLRWALGSVEIFLSRHCPIWYGWSGSRLKLLQRLAYINTVVYPFTAFPLLAYCTLPAICLLTNQFIIPEISSLNSLWFIALFISIFACAFLEMRWSGVGMEEWWRNEQFWVIGGVSSHLYAVFQGLLKVLAGIDTNFTVTAKAADDGEAYADLYLFKWTSLLIPPTTLIIINLIGAVAGVANAINNGYDQWGPLFGKLFFAFWVVVHLYPFLKGLMGKSNRTPTLIIVWSVLLASIFSLLWVKINPFTNTTNGPALVQCGIRC

SEQ ID NO: 1100 - protein, 493 aa, Arabidopsis thaliana
MGETAAANNHRHHHHHGHQVFDVASHDFVPPQPAFKCFDDDGRLKRTGTVWTASAHIITAVIGSGVLSLAWAIAQLGWIAGPAVMLLFSLVTLYSSTLLSDCYRTGDAVSGKRNYTYMDAVRSILGGFKFKICGLIQYLNLFVIAIGYTIAASISMMAIKRSNCFHKSGGKDPCHMSSNPYMIVFGVAEILLSQVPDFDQIWWISIVAAVMSFTYSAIGLALGIVQVAANGVFKGSLTGISIGTVTQTQKIWRTFQALGDIAFAYSYSVVLIEIQDTVRSPPAESKTMKKATKISIAVTTIFYMLCGSMGYAAFGDAAPGNLLTGFGFYNPFWLLDIANAAIVVHLVGAYQVFAQPIFAFIEKSVAERYPDNDFLSKEFEIRIPGFKSPYKVNVFRMVYRSGFVVTTTVISMLMPFFNDVVGILGALGFWPLTVYFPVEMYIKQRKVEKWSTRWVCLQMLTVACLVISVVAGVGSIAGVMLDLKVYKPFKSTY

SEQ ID NO: 1101 - protein, 486 aa, Ricinus communis
MVENTAAKNHPHQVFDVSINMQTQVVGSKWLDDDGRTKRTGTVWTASAHIITAVIGSGVLSLAWAIAQLGWIAGPAVMFLFSLVTYYTSTLLSACYRSGDPVNGKRNYTYMDAVRTNLGGAKVKLCGFVQYLNLFGVAIGYTIASSISMMAIKRSNCFHKSGGKNPCHINANPYMIAFGIAEIIFSQIPDFDQLWWLSILAAVMSFTYSTIGLGLGIAQVVENGKAMGSVTGISIGANVTPTQKIWRSFQALGDIAFAYSYSIILIEIQDTVRSPPSESKTMKKATLISVAVTTLFYMLCGCFGYAAFGDMSPGNLLTGFGFYNPYWLLDIANVAIVVHLVGAYQVYCQPLFAFVEKAAAQRYPDSGFITKDIKIPVPGFRPFNLNLFRSVWRTLFVVFTTVISMLLPFFNDIVGLLGALGFWPLTVYFPVEMYIAQKKIPKWSTRWLCLQILSAACLVITIAAAAGSIAGVVGDLKSVKPFQTSY

SEQ ID NO: 1102 - protein, 616 aa, Cyanidioschyzon merolae
MVATDKARGVVQAVSGPVVVARDCPASMYELVRVGHERIVGEVIRLEGSSVTIQCYEATDALAVGDPVERTGMPLTVELGPGLMSSIFDGISRPLEKIATLSGSVFIPRGVDVPSLDRERQWYFEPDPALSVGRLVTGGDWIGSVQETPLILHRIMVPPGTMGTVEWIAPSGWYTITDTVLKVSHQGVSKALSMMQRWPVRQPRPIAEKLVANTPLITGQRVLDTLFPCVQGGTCAVPGAFGVGKTVISQALSKYSNSDGIVYVGCGERGNEMAEVLRDFPELTMSLADGEQVSIMNRTLLVANTSNMPVAAREASIYTGITIAEYYRDMGHDMSMMADSTSRWAEALREISGRLAEMPADSGFPAYLAARLASFYERAGRVKCLGSPERTGSVTVVGAVSPPGGDFSDPVTTATLSTVSVFWGLDKRLASRKFFPAVNTNISWSKNIQALEPWYDAHYPEFPSIRQTVRQILQMEEDLSEIVALVGRDALAESDKVVLAAATMIREDCLQQNSYTSYDAYCPFLKSMLMLRNIVLWYELAQKAVAEVDRDAGATSASNRLTFAGLRDVQMDLLNRLSRMKFLEPSMGDDALRRHLDALRDDIVKSFRERDWALTA

SEQ ID NO: 1103 - protein, 508 aa, Nicotiana tabacum
MAIENNNNGVNFCTVKRPKTKIVCTLGPASRSVPMIEKLLRAGMNVARFNFSHGSHDYHQETIDNLRQAMESTGILCAVMLDTKGPEIRTGFLKDAKPVQLKQGQEITISTDYSIKGDESMICMSYKKLAEDVKPQSVILCADGQITFTVLSCDKENGLDRCRCENTAVLGERKNVNLPGVIVDLPTLTDKDKDDILNWGVPNHIDMIALSFVRKGSDLVEVRKLLGEHAKNILLMSKVENQEGVANFDDILLNSDAFMVARGDLGMEIPIEKIFLAQKVMIYKCNIQGKPVVTATQMLESMIKSPRPTRAEATDVANAVLDGTDCVMLSGETAAGAYPDLAVGTMAKICIEAESTIDYPDVFKRIMSNAPVPMSPLESLASSAVRTANSAKAALILVLTRGGSTAKLVAKYRPGMPILSVVVPEIKTDSFDWTCSDESPARHSLIFRGLVPVLHAGSARASHEESTEEALDFALQHAKTKGLCKQGDSVVALHRVGTASVIKIVTVK

SEQ ID NO: 1104 - protein, 585 aa, Listeria innocua
MKKTKIVCTIGPASESVDTLVQLIEAGMNVARLNFSHGDFEEHGARIVNIREASKKTGKQVAILLDTKGPEIRTNDMVGGKLEFQTGDVVRVSMTPVEGTKEKFSVTYGELYDDVEIGSSILLDDGLIGLEVIEKDEANRELVTKVLNPGVLKNKKGVNVPNVSINLPGITEKDAADIRFGLEQGIDFIAASFVRRATDVLEITKILEEHNATHVQIIPKIENQEGVDNIDEILQVSQGLMVARGDLGVEIPAEEVPIVQKELIRKCNKLGKPVITATQMLDSMQRNPRPTRAEASDVANAIFDGTDAIMLSGETAAGDYPVEAVKMMAKIAVRTEEVLVAQDKFALKLHENTDMTEAIGQAVGHTAKNLNVQTIVAATQSGHTARMISKYRPKSHIVAVTFNEHVYRGLALSWGVYPRLATPVSNTDEMFDLAVKESLASGVAKQGDLIIITAGVPVTESGTTNVMKIQLIGEKVVKGQGIGSKSVIGKAVVAKSNAEALQKAEEGGILIVKTTDKEILPAFEKSAAVVVEEGGLTSHAAVVGINLGIPVIVGAKDATSLVKDGEIITVDSRQGVVYNGKTATH

SEQ ID NO: 1105 - protein, 144 aa, Glycine max
  unsure (1)..(144): unsure at all Xaa locations
DDAAIRLGVERRRIYDIVNVLESIGLLSRKAKNQYIWRGFVAIPHTLQELKEEGLKDNSNFLRGSGNDNDKVSDDEDDEETLSNPATGSQSDKLNPNSSTLTKSLKNAEPTXHFENRREKSLALLTXNFVKLFVCSNVELISLD

SEQ ID NO: 1106 - protein, 295 aa, Azotobacter vinelandii
MRLTRSILSTDPSTLLTYPCTYESVSGLGIQVFTLSVTACSSSAREYSAQVPFELTTRGIGASNMDMQYAIFDMDGLLIDSEPLWMSTQAALLHELYGIAPGTQDLHAWKGVSSRAFCEDMARLHAGRGVEAGTLFEALIARMGRAIVEAPLMPGAVELIDWLRERHVGLAIASSSPLPFIAAVVRRHALPIAVFASGTEVPRSKPHPAVFELAAERLGAQRHQCRVWEDSLNGVIAARAAGMPVVAVPDPAHPGAERFAIADRVHRTLHESLAELNAADPGTPTIKSPNHVQPA

SEQ ID NO: 1107 - protein, 510 aa, Solanum tuberosum
MANIDIAGIMKDLPNDGRIPKTKIVCTLGPSSRTVPMLEKLLRAGMNVARFNFSHGTHEYHQETLDNLKIAMQNTQILCAVMLDTKGPEIRTGFLTDGKPIQLKEGQEITVSTDYTIKGNEEMISMSYKKLVMDLKPGNTILCADGTITLTVLSCDPPSGTVRCRCENTATLGERKNVNLPGVVVDLPTLTEKDKEDILEWGVPNNIDMIALSFVRKGSDLVNVRKVLGPHAKRIQLMSKVENQEGVINFDEILRETDSFMVARGDLGMEIPVEKIFLAQKMMIYKCNLAGKAVVTATQMLESMIKSPAPTRAEATDVANAVLDGTDCVMLSGESAAGAYPELAVKIMSRICIEAESSLDNEAIFKEMIRCTPLPMSPLESLASSAVRTANKARAKLIVVLTRGGSTAKLVAKYRPAVPILSVVVPVLTTDSFDWSISDETPARHSLVYRGLIPLLGEGSAKATDSESTEVILEAALKSAVTRGLCKPGDAVVALHRIGSASVIKICVVK

SEQ ID NO: 1108 - protein, 591 aa, Chlamydia trachomatis
MVATSKQTTQGYVVEAYGNLLRVHVDGHVRQGEVAYVSVDDTWLKAEIIEVVGDEVKIQVFEETQGISRGALVTFSGHLLEAELGPGLLQGIFDGLQNRLEILADTSLFLRRGEYVNAICRETVWAYTQKASVGSVLSRGDVLGTVKEGRFDHKIMVPFSCFEEVTITWVISSGNYTVDTVVAKGRTSTGEELEFTMVQKWPIKQAFLEGEKVPSHEIMDVGLRVLDTQIPVLKGGTFCTPGPFGAGKTVLQHHLSKYAAVDIVVLCACGERAGEVVEILQEFPHLTDPHTGQSLMHRTCIICNTSSMPVAARESSIYLGITIAEYYRQMGLHILLLADSTSRWAQALREISGRLEEIPGEEAFPAYLASRIAAFYERGGAVKMKDGSEGSLTICGAVSPAGGNFEEPVTQATLSVVGAFCGLSKARADARRYPSIDPMISWSKYLDSVAEILEKKVPGWGESVKQASRFLEEGAEIGKRIEVVGEEGISMEDMEIFLKSELYDFCYLQQNAFDAEDCYCPFDRQIELFSLMNHIFNSRFCFDCPDNARSFFLELQSKIKTLNGQKFLSEEYQKGLEVIYKLLESKMVQTV

SEQ ID NO: 1109 - protein, 270 aa, Methanothermobacter thermautotrophicus
MSGAKSMSYAEMFRRADGCAFVPFVVAGDPDMETSLEIIRTLVDAGADALEVGFPFSDPIADGTSVQGADLRALRAGMTTEKCFQLIERVREFTSIPIGLLVYYNLIYRMGVDEFYRRAAEAGVTGILAADLPPEEASDALRAAEKYDIDQIFIVAPTTGSERLKRISEVSSGFHYLVSVMGVTGARSRVEDATIELIKRVKAEGSLPVMVGFGVSRPEHVRMLRDAGADGVIVGSAIIDVISGNLGDRELMLQRIHEMAGTLKAAGGSG

SEQ ID NO: 1110 - protein, 242 aa, Shigella sonnei
LKERKEGAFVPFVTLGDPGIEQSLKIIDTLIEAGADALELGIPFSDPLADGPTIQNATLRAFAAGVTPAQCFEMLALIRQKHPTIPIGLLMYANLVFNKGIDEFYAQCEKVGVDSVLVADVPIEESAPFRQAALRHNVAPIFICPPNADDDLLRQIASYGRGYTYLLSRAGVTGAENRAALPLNHLVAKLKEYNAAPPLQGFGISTPDQVKAAIDAGAAGAISGSTIVKIIEQHINEPEKML

SEQ ID NO: 1111 - protein, 309 aa, Cytophaga hutchinsonii
MKIYRDIKEFQPVNKAVVTIGAFDGVHIGHKKILNRLTELSSLVNGESVLITFWPHPRFVLKKDAEPIGLLNTLEEKIHLLDTYNIDHLLILNFNEEFSKLTADAFIENILIKSIGTRYLVLGYDHRFGNNREGSIDYLNANKERFEIESIEIPKQEIESLAISSTLIRKALLNGDSTVANQNLGYPYLLRGFVIEGNKLGRTIGFPTANIFIEDQDKLIPKNGVYAVYAYIEGERYKGMLNIGVRPTINNDKRRTIEVHIFDFNQDIYGKTVRLELITYIRDEVKFSGIDTLILQLKQDEIETRAILK

SEQ ID NO: 1112 - protein, 281 aa, Burkholderia fungorum
MLRSNSIREYSMSRIKNTFAALSAQGKKGLIPFMTAGDPDPARTVEFMHALAAGGADVIELGVPFSDPMADGPVIQQSSERALAQGVSLRHVIADVKRFRETNDTTPVVLMGYANPIERMGTEAFARAAKEAGVDGVLVVDYPPEECANFAEQMRSAGIDPIFLLAPTSTDERIAEVGKIASGYVYYVSLKGVTGAANLDVSSIASKIPAIKSRVPLPVGVGFGIRDAQTARAVAEVSDAVVIGSRIVQLLEQAAPESAAATLTRFIAEVREALDSVATAR

SEQ ID NO: 1113 - protein, 453 aa, Pisum sativum
MATSTLSPSPLLLLLLLFHLVATVTSIGVNYGTLGDNLPPPATVANFLKTNTIIDSVKIFDVSPQILQAFANTGISVTVTAPNGDIEALAKIDSARQWVVTHIKPFHPQTKINYILVGSEVFHWGDSVMIRNLVPAMRTLHSALLAEGITDIKVTTAHSLAILRQSLPPSAGNSDQDTAKYFIGPMLKFLRQTRTPFMVNPYPYFGYNPKNANFALFRPNRGLFDRNTKLLYTNQFDALMDAVHSAMKALGYGDVDIAVGETGWPSVCDGWDACSVANAQSYNGQLIRHLAEGKGTPLMPNRRFETFIFALFNENQKPGPIAERNWGLFQPDFSSVYDAGILRNGQKPVAPVKGGGKMPTPRPVVGGQKWCVPKADASPGALQANINYVCSQGIDCRPIQPGGVCYAANNVKAIATYAMNAYYQANGKHDYNCDFSHSGVTTSVNPSHDNCRI

SEQ ID NO: 1114 - protein, 961 aa, Nicotiana tabacum
MVELNNCSNSEENGCVDSLEVRFTDFCKNGLSMGESFVTEATKLFNDSKHLLLSNNSTIGVITEGVERYWFVFVLYSVKRLSEKEVGNSSNGNEGNAFSLCQILRGAKLNVVDFFKELPQFILKVGPTLSNLYGSDWEKRLEAKELQTNFVHLSLLSKYYKRAYQELFLASGNNEDKPSATSSSAIHLPQYYRFGWLLFLSLRIHVFSRFKDLVTCTNGLVSVLAILIIHVPVRFRNFNINDSSRFVKKGDKVDLLASLGKIYQTSIDDLRETMDKVNYLITEKLKKKPCLASEFRTENLDNLDTDGLTYFEDLMEESCLPSSVSILEKDYSDAIQNKGELDERIFVNEEDSLLGSGSLSGGVVNMNGVKRKFDAMASPAKTVTSTLSPYRSPNCANSKMTVATPVSTAMTTARWLRTVIAPLQPKPSAELERFLSSCDRDVTADVIRRAQIILEAIFPSSGPAEHCAAGGSLQSTSLMDNIWAEQRTSEALKLYYRVLQTMCTAESQILNGNNLTSLLTNERFHRCMLACSAELVLATHKTVTMLFPAVLERTGITAFDLSKVIESFIRHEESLPRELRRHLNSLEERLLESMVWEKGSSMYNSLAVAKPSLAAEINRTGLLAEPMPSLDAIAMHINLSSGSLPPLPSLHKNNLAPNGQIGDIRSPKKVCSEYRSVLVERNSFTSPVKDRFLALNNIKSKFPPPALQSAFASPTRPNPGGGGETCAETAINVFFGKIVKLAAVRINGMIERLQLSQQIRETVYCLFQKILSQRTSLFFNRHIDQIILCSFYGVAKRTGADHVDIITFYNEMFIPSVKPLLVELAPAGNAEKNNHNDGQGPASPKPSPFPKLPDMSPKKVSAVHNVYVSPLRASKMDALISHSSKSYYACVGESTHAYQSPSKDLDVINNRLNGNRKLRGALNFDVDAGLVSDSIVANSLYLQNGNCRSPVAHVKTEQPES

SEQ ID NO: 1115 - protein, 476 aa, Pirellula sp.
MQDYRHTKIIATIGPATESPEKLAALIEAGVDVMRLNMAHGTPEWVGEIVARIRKVSKDISRHVAVMMDVKGPEIRTGAVEDAIELKAGDELVLFTEDCADQSAVESDGTPRVSVNYLGLPGAIDLDSTILVDSGLLHWHVLKKDATTVRCRVITPGVLESRRHINLPGVQVNLPAITDKDRTDLAAGVKAGIDFVALSFVRQAEDVRTLRAFLDEHGSPARIISKIEDQAGVRNMKAIIRQSDAIMVARGDLGVEIDYHRLPLVQTDLIRACQEDGKPVIIATHLLESMIQSPVPTRAEVSDVSNAIREQADAVMLSGETTTGKYPLESVGVLQNIVASIEPTVSRQLNSKIVLREPKSMMLRSACTLAQEMGDSGIVVFTRSGFLAYVLGALRPRGVPIFAFTDVEHTFRHLMLPWGVEPFFMEFSEDHDQTITNALEVLKESGWCKPGVWLGVITNALADEKIIDTLQLRQVQ

SEQ ID NO: 1116 - protein, 256 aa, Oryza sativa (japonica cultivar-group)
MDGGYGSVTIVHDARSPEDVFQDFCGRRSGIVKALTIEVEKFYKQCDPEKENLCLYGLPNGTWAVTLPADEVPPELPEPALGINFARDGMQEKDWLSLIAVHSDSWLLSVAFYFGARFGFDKKARERLFMMTSSLPTVFEVVSGGVNTQSKTANGSSKNKSGSKPPKRPNSDSKPQKQVQAKYEEENGGRGNGGDEDQAETICGACGEAYANGEFWICCDICETWFHGKCVRITPAKAEHIKHYKCPGCSNKRTRE

SEQ ID NO: 1117 - protein, 176 aa, Triticum aestivum
SHLIGSPELADIRNDPGFGQCSSVVCSMEAQNPPPNAIGTRGGHRGGGTDRRGHIPLNDKVIQIIDIEDDPPIEPSVSDTLRPKSEMVYPSMDNMMSSSVNTNIFPGTQDGYNIAIPDFLGADMPCYPPLHADLHAEMGLNDPEVITVMDDPIYDSLGDIGFMEVWDQQPPDYKFF

SEQ ID NO: 1118 - protein, 485 aa, Bacteroides thetaiotaomicron VPI-5482
MLLKQTKIVASISDRRCDVDFIKQLFEAGMNVVRMNTAHASREGFEALIANVRSVSNRIAILMDTKGPEVRTTANAEPIPYQIGDKVKIVGNPDQETTRECIAVSYPNFVNDLNIGGLVLIDDGDLELEVIDKTADYLLCEVKNDATLGSRKSVNVPGVRINLPSLTEKDRNNILYAIEKDIDFIAHSFVRNRQDVLDIREILDAHNSDIRIIAKIENQEGVDNIDEILEVADGVMVARGDLGIEVPQERIPGIQRVLIRKCILAKKPVIVATQMLHTMINNPRPTRAEVTDIANAIYYRTDALMLSGETAYGKYPVDAVKTMTKIAAQAEKDKLEENDIRIPLNENSNDVTAFLAKQAVKATSKLKIRAIITDSYSGRTARNLAAFRGKFPVLAICYKEKTMRHLALSYGVEAIYMPELANGQEYYFAALRRLLKEGRLQPTDMVGYLSSGKAGTQTSFLEINVVEDALKHAGETVLPNNNRYL

SEQ ID NO: 1119 - protein, 499 aa, Hordeum vulgare
MIGTRVLAHSRVDPAIRWGVAARGRVVFAAIRWGAAARGRVVFAAVRWGAAARGTKREAGQETSTSETKKTKRKWGRGFCGMASHEVEEPLTSETKKTKRKWGRGFCGMASHEAEEPLTSETKKKRKNVAASSEPDKKRWFKNKIWKKKKAKNEQLATLVKEISLATKLNSAMHVNINLSMNICPTQTYEEHSGTYLRNLAVIAVKQLDKDGLQGNREFLVEVLMLSLLHHPNLVTLLGYCTECDQKILVYEYMPLGSLQDHLLDLTPKSQPLSWHTRMKIAVDAARGLEYLHEVANPPVVYRDLKASNILLDGNFSAKLADFGLAKLGPVGDKTHVTTRVMGTYGYCAPEYAMSGKLTKMSDIYCFGVVLLELITGRRAIDTTKPTREQILVHWAAPLFKDKKKFTKMADPLLDSKYPLKGLYQALAISSMCLQEEAISRPLISDVVTALTFLADPNYDPPDDIEPLPISVPNYDKGISLREAEISLSGFEEKQVEDS

SEQ ID NO: 1120 - protein, 623 aa, Vigna radiata var. radiata
MPAVYGARLTTFEDSEKESEYGYVRKVSGPVVVADGMAGAAMYELVRVGRDNLIGEIIRLEGDSATIQVYEETAGLMVNDPVLRTHKPLSVELGPGILGNIFDGIQRPLKTIAKRSGDVYIPRGVSVPALDKDTLWEFQPKKIGEGDLLTGGDLYATVFENTLMQHHIALPPDAMGKITYIAPPGQYSITDTVLELEFQGVKKKFTMLQTWPVRTPRPVASKLAADTPLLTGQRVLDALFPSVLGGTCAIPGAFGCGKTVISQALSKYSNSDAVVYVGCGERGNEMAEVLMDFPQLTMTLPDGREESVMKRTTLVANTSNMPVAAREASIYTGITLAEYFRDMGYNVSMMADSTSRWAEALREISGRLAEMPADSGYPAYLAARLASFYERPGKVKCLGGPERTGSVTIVGAVSPPGGDFSDPVTSATLSIVQVFWGLDKKLAQRKHFPSVNWLISYSKYSTALESFYEQFDPDFINIRTKAREVLQREDDLNEIVQLVGKDALAEGDKITLETAKLLREDYLAQNAFTPYDKFCPFYKSVWMMRNIIHFYNLANQAVERGAGSDGQKITYSLIKHRVGDLFYRLVSQKFEDPAEGEAALVGQFQKLHEDLSTGFRNLEDETR

SEQ ID NO: 1121 - protein, 480 aa, Medicago sativa
MSLPPPIPPPSLTTPPKARPTELPIRQIPGSYGWPLLGPLSDRLDYFWFQKPENFFRTRMDKYKSTVFRTNIPPTFPFFTNVNPNIIAVLDCKSFSHLFDMDLVDKRDVLVGDFVPSVEFTGNIRVGVYQDVSEPQHAKAKNFSMNILKQSSSIWVPELISNLDIFLDQIEATLSKSSSASYFSPLQQFLFTFLSKVLARADPSLDSKIAESGSSMLNKWLAVQLLPTVSVGTIQPLEEIFLHSFSYPYALVSGDYNNLYNFIKQHGKEVIKSGTEFGLSEDEAIHNLLFVLGFNSYGGFSIFLPKLIESIANGPTGLQEKLRKEAREKGGSTLGFDSLKELELINSVVYETLRMNPPVPLQFGRARKDFQLSSYDSAFNVKKGELLCGFQKLIMRDPVVFDEPEQFKPERFTKEKGAELLNYLYWSNGPQTGSPTVSNKQCAGKDIVTFTAALIVAHLLRRYDLIKGDGSSITALRKAK

SEQ ID NO: 1122 - protein, 540 aa, Triticum aestivum
  unsure (1)..(540): unsure at all Xaa locations
MEASAQQGNYVQVYVMLPLXDIVSVNNRFEKGDELRGQLKRLVEAGVDGVMVDVWWGLVEGKGPRVYDWSAYKQLFELVHEAGLKLQAIMSFHQCGGNVGDVVNIPIPQWVRNVGVSDPDIFYTDQHGTRNIEYLTLGVDDQPLFHGRSAVQMYADYMASFRDNMKEFLDAGLIVDIEVGLGPAGELRYPSYPQSHGWSFPGIGEFICYDKYLQADFKAAAAMVGHPEWEFPRDAGTYNDTPQRTRFFVDNGTYLTEQGRFFLAWYSNNLIKHGDKILDEANKVFLGHTVQLAIKISGIHWWYKVPSHAAXEVTAGYYNLHDXDGYRPIARMLKRHHASLNFTCAEMRDSEQSSQAMSAPEELVQQVLSAGWREGLNMACENALPRYDPTAYNTILRNARPHGINKSGPPEHKLFGFTYLRLSNQLVEGQNYVNFKTFVDRMHANLPHDPCVDPVAPLQRSGPELTIEMXLQAAQPKLEPFPFEEHTDLPVQGLGGIGGGEVEDPTGGMGGEVQQDPTGGMGGEVEDPTGGMGGELPPTV

SEQ ID NO: 1123 - protein, 488 aa, Silene nutans
  unsure (1)..(488): unsure at all Xaa locations
INPTTSGXGVSTREKKNLGRIAQIIGPVLDVXFLQXKMPNIYNALVVKGRDTASQPINVTCEVQQLLGNNRVRAVAMSATEGLTRGMEVIDTGAPLSVPVGGATLGRIFNVLGEPVDNLGPVGTHTTSPIHRSAPAFTQLDTKLSIFETGIKVVDLLAPYRRGGKIGLFGGAGVGKTVLIMELINNIAKAHGGVSVFGGVGERTREGNDLYMEMKESGVINEQNIAESKVALVYGQMNEPPGARMRVGLTALTMAEYFRDVNEQDVLLFIDNIFRFVQAGSEVSALLGRMPSAVGYQPTLSTEMGSLQERITSTKEGSITSIQAVYVPADDLTDPAPATTFAHLDATTVLSRGLAAKGIYPAVDPLDSTSTMLQPRIVGEEHYEIAQRVKQTLQRYKELQDIIAILGLDELSEEDRLTVARARKIERFLSQPFFVAEVFTGSPGKYVGLGETIRGFQLILSGELDGLPEQAFYLVGNIDEATAKAMNL

SEQ ID NO: 1124 - protein, 470 aa, Escherichia coli
MKKTKIVCTIGPKTESEEMLAKMLDAGMNVMRLNFSHGDYAEHGQRIQNLRNVMSKTGKTAAILLDTKGPEIRTMKLEGGNDVSLKAGQTFTFTTDKSVIGNSEMVAVTYEGFTTDLSVGNTVLVDDGLIGMEVTAIEGNKVICKVLNNGDLGENKGVNLPGVSIALPALAEKDKQDLIFGCEQGVDFVAASFIRKRSDVIEIREHLKAHGGENIHIISKIENQEGLNNFDEILEASDGIMVARGDLGVEIPVEEVIFAQKMMIEKCIRARKVVITATMMLDSMIKNPRPTRAEAGDVANAILDGTDAVMLSGESAKGKYPLEAVSIMATICERTDRVMNSRLEFNNDNRKLRITEAVCRGAVETAEKLDAPLIVVATQGGKSARAVRKYFPDATILALTTNEKTAHQLVLSKGVVPQLVKEITSTDDFYRLGKELALQSGLAHKGDVVVMVSGALVPSGTTNTASVHVL

SEQ ID NO: 1125 - protein, 487 aa, Dinetus truncatus
  unsure (1)..(487): unsure at all Xaa locations
NPTTSGSEVSAVEKKNLGRIVQIIGPVLDVAFPPGKMPYIYNALVVQGGDNEQTNVTCEVQQLLGNNRVRAVAMSDTDGLMRGLEVIDTGAPISVPVGGSTLGRIFNVLGKPVDNLGPVDTNTTSPIHRSAPAFIQLDTKLAIFETGIKVVDLLAPYRRGGKIGLFGGAGVGKTVLIMELINNIAKAHGGVSVFGGVGERTREGNDLYMEMKESGVINEETVAESKVALVYGQMNEPPGARMRVGLTALTMAEYFRDVNEQDVLLFIDNIFRFVQAGSEVSALLGRMPSAVGYQPTLSTEMGSLQERITSTKEGSITSIQAVYVPADDLTDPAPATTFAHLDATTVLSRGLAAKGIYPAVDPLDSTSTMLQPRIVGEEHYETAQRVKQTLQRYKELQDIIAILGLDELSEEDRLTVARARKIERFLSQPFFVAEVFTGSPGKYVGLAETIRGFQLILSGELDGLPEQAFYLVXNIDEATAKAMNLKT

SEQ ID NO: 1126 - protein, 451 aa, Streptochaeta spicata
TSRPGVSTIEEKSAGRIDQIIGPVLDVTFSPGKLPYIYNALVVKSRDTAGKQINVTCEVQQLLGNNRVRAVAMSATDGLMRGMEVIDTGAPLSVPVGGATLGRIFNVLGEPVDNLGPVDTSATFPIHRSAPAFIELDTKLSIFETGIKVVDLLAPYRRGGKIGLFGGAGVGKTVLIMELINNIAKAHGGVSVFGGVGERTREGNDLYMEMKESGVINEKNIEESKVALVYGQMNEPPGARMRVGLTALTMAEYFRDVNKQDVLLFIDNIFRFVQAGSEVSALLGRMPSAVGYQPTLSTEMGSLQERITSTKKGSITSIQAVYVPADDLTDPAPATTFAHLDATTVLSRGLAAKGIYPAVDPLDSTSTMLQPRIVGDEHYETAQRVKETLQRYKELQDIIAILGLDELSEEDRLTVARARKIERFLSQPFFVAEVFTGSAGKYVGLAETIRG

SEQ ID NO: 1127 - protein, 279 aa, Sinorhizobium meliloti
MTARMEQRFADVAAEGRPVLVTYFMGGDPDFDTSLAIMKALRQAGADIIELGVPFSDPMADGPAIQLAGQRALKAGQSLAKTLELARLFRAEDQRTPIVLMGYYNPIYIYGVERFLADALEAGVDGLIVVDLPPEMDDELCIPALEKGISFIRLATPTTDDRRLPKVLENTSGFVYYVSMTGITGSALPDPSLIAGAVARIKAHTPLPVCVGFGVKTADHARAIGASADGVVVGTAIVNQIASSLTEEGRATEATVPGVEALVRGLAAGVRAARLAAAE

SEQ ID NO: 1128 - protein, 496 aa, Nicotiana attenuata
MSTLMAKMMSGSTPTNPGSTGTSSPSLTPPPASLPVRTIPGGYGWPLLGPISDRLDYNWFQGPNTFFTKRIEKHKSTVFRTNVPPCFPFFLGVNPNVVAVLDVKSFSHLFDMEIVEKANVLVGDFMPSVKYTGDMRVCAYLDTSEPKHTQIKNFSLDILKRSSKTWVPTLVNELNSMFETFESDISKSNSASLLPTMQKFLFNFFSLSLLGANPSASPEIANSGYVMLDTWLAIQLAPTVSIGLLQPLEEIFVHSFNYPFFLVKGSYEKLIQFVKNEAKEVLNRGKSEFGLTEQEAIHNLLFILGFNAFGGFSIFLPTLLGNLGDEKNAELQEKLRNEVREKVGLKTENLSFESVKEMELVQSFVYETLRLSPPVPSQYARARKDFKLSSHDSVYEIKKGELLCGYQPLVMRDPKVFDDPEKFVLERFTKEKGKELLNYLFWSNGPQTGRPTESNKQCAAKDVVTLTASLIVAYIFQRYDSVSFSSGSLTSVKKAS

SEQ ID NO: 1129 - protein, 261 aa, Oryza sativa
  unsure (1)..(261): unsure at all Xaa locations
FGSSYLYESSSLHGFFIPISSRHYTYNRKQKSLGLLCTNFLSLYNRDTVHLIGLDDAATRLGVERRRIYDIVNVLESIGVLSRKAKNQYTWRGFAAIPLTLQDLKEEGLKENSNSLRGPGNHDKVSDDEDDEETQSNPAATGSQSDKLNPNSTLPKPLKNENRREKSLALLTQNFVKLFVCSNVELISLDEAAKLLLGDAHNTSVMRTKVRRLYDIANVLSXMNLIEKTHTMDTRKPAFRWLXSEGKTWDETLHISNLNDS

SEQ ID NO: 1130 - protein, 225 aa, Prochlorococcus marinus subsp. pastoris str. CCMP1378
MEFPEAILFDLDGVLLDTEPLLANAWSETAKEYNHSLSIDKLLELKGRRRIDCAKKVLNWINKESSLEELLIIQKLKVDKVLTKAKPFKGAIELINFCINTNLPIALVTSSSSESFKIKSSVNPWLNLFKTKVLGDDKFISNGKPSPDPYLRALKILDVDPRKSWVIEDSYAGSISGLKAECNLMFFSKDNEILNKLINEFNQEKIQKVNELSEIIYYLKLYKGF

SEQ ID NO: 1131 - protein, 429 aa, Buchnera aphidicola str. APS (Acyrthosiphon pisum)
MTDKSKDNSKSLLYCSFCGKNQKEVQKLIAGPKVYICDECIRLCNDIITEETIKQNNITDTENKINYLPKPHEIKKHLDNYVIGQNYTKKVLSVAVYNHYKRLYNFNKKTDSVELGKSNILLIGPTGSGKTLLAQTLAKLLDVPFTITDATTLTEAGYVGEDVENVIQKLLQKCKYNVKKAELGIVYIDEIDKIARKSDNPSITRDVSGEGVQQALLKLIEGTLASIPPQGGRKHPQQEFLQVNTSNILFICAGAFSELSKIVSKRLDAGTEIGFKANIKEKKQKKSEDFLLKQVEPEDLIKFGLIPEFIGRLPIITILNKLTEDALVNILCKPKNALIKQYQTLFELENVKLEFNAESIQLIAKKAMNKNTGARGLRSIIEGILLNIMYELPSMVNIEKILINESVVNSNSLPKIIYGKNKSKKASGE

SEQ ID NO: 1132 - protein, 426 aa, Mycobacterium tuberculosis H37Rv
MARIGDGGDLLKCSFCGKSQKQVKKLIAGPGVYICDECIDLCNEIIEEELADADDVKLDELPKPAEIREFLEGYVIGQDTAKRTLAVAVYNHYKRIQAGEKGRDSRCEPVELTKSNILMLGPTGCGKTYLAQTLAKMLNVPFAIADATALTEAGYVGEDVENILLKLIQAADYDVKRAETGIIYIDEVDKIARKSENPSITRDVSGEGVQQALLKILEGTQASVPPQGGRKHPHQEFIQIDTTNVLFIVAGAFAGLEKIIYERVGKRGLGFGAEVRSKAEIDTTDHFADVMPEDLIKFGLIPEFIGRLPVVASVTNLDKESLVKILSEPKNALVKQYIRLFEMDGVELEFTDDALEAIADQAIHRGTGARGLRAIMEEVLLPVMYDIPSRDDVAKVVVTKETVQDNVLPTIVPRKPSRSERRDKSA

SEQ ID NO: 1133 - protein, 403 aa, Deinococcus radiodurans
MTRATADRCSFCGRQHPQIAQLIEAPGRAAFICNECAERAFDLVKQQRKEAGSEFSLDELPSAKEIKAYLDEFVIGQDEAKKALAVAVVSHYHRLSNPDAGLQKSNILLIGPTGTGKTLLAQSLAEMLEVPFAIADATTLTEAGYVGDDVENVIVRLLQAAEYDVAAAERGIIYVDEIDKIARKSEGTSITRDVSGEGVQQALLKIIEGTVAQVPPQGGRKHPQQELVQVDTRNILFIVGGAFESMSEIARARTNVRAVGFGAEHKGEEKEEVRFLPEDLVKFGLIPEFVGRLPLVVQLQDLDEDALIRILTEPQGAIIKQYQALFGFQGVDLTFSEEALQEVAHRAKERKTGARGLRAVLEKSMTDLLFELPRDDVKEIRFEAEYIDDPLKALESKGLKKSA

SEQ ID NO: 1134 - protein, 481 aa, Arabidopsis thaliana
MNRQNGGGQRLRSARPTTIHDCALSGDLIALQRLLKDNPSLLNERNPVMYHTPLHVSAGNGNVDIVKYLLAWTGSDKVELEAMNTYGETPLHMAAKNGCNEAAKLLLESGAFIEAKASNGMTPLHLAVWYSITAKEISTVKTLLDHNADCSAKDNEGMTPLDHLPQGQGSEKLRELLRWFLQEQRKRSALEQCGKTKAKMELLEDELSNIVGLSELKTQLRKWAKGMLLDERRRALGLNIGTRRPPHMAFLGNPGTGKTMVARVLGKLLNTVGILPTDKVTEVQRTDLVGEFVGHTGPKTRRKIQEAEGGILFVDEAYRLIPMQKADDKDYGLEALEEIMSVMDTGKIVVIFAGYSEPMKRVIASNEGFCRRVTKFFNFSDFSAKELAQILHIKMNNQGEDTLFYGFRLHESCTLQEIASLIEAETTEKQRKEMNGGLVDTLLVNARENLDLRLSFECVDTEEICTIKLEDLEAGLRVFSQ

SEQ ID NO: 1135 - protein, 484 aa, Tacca leontopetaloides
VSTLEEKNLGRIAQIIGPVLDVVFPPGKMPNIYNALVVKGRDTAGQQINVTCEVQQLLGNNRVRAVAMSATDGLMRGMEVIDTGAPLSVPVGEVTLGRIFNVLGEPVDNLGPVDTRTTFPIHRSAPAFIQLDTKLSIFETGIKVVDLLAPYRRGGKIGLFGGAGVGKTVLIMELINNIAKAHGGVSVFGGVGERTREGNDLYMEMKESGVINEKNIAESKVALVYGQMNEPPGARMRVGLTALTMAEYFRDVNEQDVLLFIDNIFRFVQAGSEVSALLGRMPSAVGYQPTLSTEMGSLQERITSTKEGSITSIQAVYVPADDLTDPAPATTFAHLDATTVLSRGLAAKGIYPAVDPLDSTSTMLQPRIVGEEHYETAQKVKQTSQRYKELQDIIAILGLDELSEEDRLTVARARKIERFLSQPFFVAEVFTGSPGKYVGLAETIRGFQLILSGELDGLPEQAFYLVGNIDEATTKAMNLEVESK

SEQ ID NO: 1136 - protein, 301 aa, SYNECHOCOCCUS SP. WH 8102
MPSSVDLAANYAESGVAEVLDQLDRELIGLTPVKTRIREIAALLLVDQARQQLELASTAPSLHMSFTGNPGTGKTTVAQRMSQILHRLGYLRKGHVVTATRDDLVGQYVGHTAPKTKEMLKRAQGGVLFIDEAYYLYKPDNERDYGAEAIEILLQEMENRRTEVVVIFAGYKDRMDSFYSSNPGLSSRVAHHLDFPDYSNADLMAIAGLLLNAQQYRFSAEAEQAFAEYITLRRQLPFFANARSIRNAIDRARLRQANRLFARMAEALTKDDLITIEAPDILASRVFTGQVEGHHLMASGG

SEQ ID NO: 1137 - protein, 91 aa, Saccharomyces kudriavzevii
ISQSLSKYSNSDAIIYVGCGERGNEMAEVLMEFPELYTEMSGTKEPIMKRTTLVANTSNMPVAAREASIYTGITLAEYFRDQGKDVSMIAD

SEQ ID NO: 1138 - protein, 488 aa, Tamarix pentandra
GPGVSTLEKKNLGRIAQIIGPVLDAAFPPGKMPNIYNALVVTGRDTAGQPINVTCEVQQLLGNNRVRAVAMSATDGLMRGMEVIDTGAPLSVPVGGATLGRIFNVLGEPVDNLGPVDTRTTSPIHRSAPAFIQLDTKLSIFETGIKVVDLLAPYRRGGKIGLFGGAGVGKTVLIMELINNIAKAHGGVSVFGGVGERTREGNDLYMEMKESGVINEQNIAESKVALVYGQMNEPPGARMRVGLTALTMAEYFRDVNEQDVLLFIDNIFRFVQAGSEVSALLGRMPSAVGYQPTLSTEMGSLQERITSTKEGSITSIQAVYVPADDLTDPAPATTFAHLDATTVLSRGLAAKGIYPAVDPLDSTSTMLQPRIVGEEHYEIAQRVKQTLQRYKELQDIIAILGLDELSEEDRLTVARARKIERFLSQPFFVAEVFTGSPGKYVGLAETIRGFQLILSGEFDSLPEQAFYLVGNIDEATAKAMNLEMESKL

SEQ ID NO: 1139 - protein, 214 aa, Streptococcus agalactiae 2603V/R
MEKVIIFDMDGVIVDSEYTFLDNKTEMLREEGIDTDVSYQYQYMGTTFEFMWQAMKEEFGLPKTVKEYIAEMNRRRQAIVARDGVRPIKGAQRLIHWLHQHGYRLAVASSSPMVDIKRNLKELGVTECFEYMVTGEDVSSSKPAPDVFLRAAELLDVDPKVCIVIEDTRNGSLAAKAAGMYCFGFANPDYPPQDLSMADKVISDYQDIYIYLPE

SEQ ID NO: 1140 - protein, 303 aa, Brucella melitensis 16M
MDGNGNGWQACCRLSRTHFATGHGMTTRIDTKFAELKAEGRPALVTYFMGGDPDLETALKVMKALPKAGADVIELGMPFSDPMADGPAIQAAGLRALNAGQTLAKTLYMAAEFRKEDDTTPIVMMGYYNLIYIYGVERFLTDAKASGVDGLIVVDLPSEMDAELCIPAMKAGINFIRLTTPTTDDKRLPKVLHNSSGFVYYVSMNGITGAAIADTAKVGEAVRHIKKSTDLPICVGFGVKTPEQAAAIATHADGVVVGTAIVNAIAGELDEKGKAKGDPVAAATRLVHALAESVRATRLEAAQ

SEQ ID NO: 1141 - protein, 253 aa, Chlamydia trachomatis
MSKLTQVFKQTKPCIGYLTAGDGGTSYTIEAAKALIQGGVDILELGFPFSDPVADNPEIQVSHDRALAENLTSETLLEIVEGIRAFNQEVPLILYSYYNPLLQRDLDYLRRLKDAGINGVCVIDLPAPLSHGEKSPFFEDLLAVGLDPILLISAGTTPERMSLIQEYARGFLYYIPYEATRDSEVGIKEEFRKVREHFDLPIVDRRDICDKKEAAHVLNYSDGFIVKTAFVHQTTMDSSVETLTALAQTVIPG

SEQ ID NO: 1142 - protein, 439 aa, Chlorobium tepidum TLS
MIKDKEPRKGQNGGRKSYGSEPPVVCSFCGRTSQEVNSMVAGPRAFICDRCILSSVEILRKEISAIRHPDQSPEPAFQPRLKSPVNIKEALDQYVIGQEQAKKSLAVAVYNHYKRLDAHDWSSGDEVVIEKSNILLIGPTGTGKTLLAQTLANLLEVPFTIADATSLTEAGYVGDDVETILARLLHASDFNLERAERGIIYVDEIDKIARKSANVSITRDVSGEGVQQALLKILEGSVVGVPPKGGRKHPEQQLININTKNILFICGGAFEGLDKIIARRVSKSSMGFGSKVRGKQTGYDPEILKLVTQDDLHDYGLIPEFIGRLPVMSVLEPLDAVALRNILVEPKNALVKQYKRLFEMDGVELEFTDEALERVVAIAIERGTGARALRSVLENVMIDIMFELPTRKDVQKCVITAETIDKTGGPVYEKKDGKERKIA

SEQ ID NO: 1143 - protein, 426 aa, Vibrio parahaemolyticus RIMD 2210633
MTDKSKESGSGKLLYCSFCGKSQHEVRKLIAGPSVYICDECVDLCNDIIREEIKDVLPKKESEALPTPKQIREHLDDYVIGQDYAKKVLAVAVYNHYKRLRNGDTTSEGVELGKSNILLIGPTGSGKTLLAETLARFLDVPFTMADATTLTEAGYVGEDVENIIQKLLQKCDYDVAKAERGIVYIDEIDKISRKAENPSITRDVSGEGVQQALLKLIEGTVASVPPQGGRKHPQQEFLQVDTSKILFICGGAFAGLDKVIEQRVATGTGIGFGAEVRSKNETKTVGELFTQVEPEDLVKYGLIPEFIGRLPVTTTLTELDEEALIQILCEPKNALTKQYAALFELENAELEFREDALRAIAKKAMERKTGARGLRSILESVLLETMYELPSATDVSKVVIDESVINGESEPLLIYSNADNQAAGAE

SEQ ID NO: 1144 - protein, 489 aa, Hydrophyllum canadense
GSGVSTLEKKTLGRIVQIIGPVLDVAFPPGKMPNIYNALVVKGRDTAGQPINVTCEVQQLLGNNRVRAVAMSATDGLTRGMEVIDTGAPLSVPVGGATLGRIFNVLGEPVDNLGPVDTRTTSPIHRSAPAFIQLDTKLSIFETGIKVVDLLAPYRRGGKIGLFGGAGVGKTVLIMELINNIAKAHGGVSVFGGVGERTREGNDLYMEMKESGVINEENIAESKVALVYGQMNEPPGARMRVGLTALTMAEYFRDVNEQDVLLFIDNIFRFVQAGSEVSALLGRMPSAVGYQPTLSTEMGSLQERITSTKSGSITSIQAVYVPADDLTDPAPATTFAHLDATTVLSRGLAAKGIYPAVDPLDSTSTMLQPRIVGEEHYEIAQRVKETLQRYKELQDIIAILGLDELSEEDRLTVARARKIERFLSQPFFVAEVFTGSPGKYVGLAETIRGFQLILSGELDGLPEQAFYLVGNIDEATAKAMNLETESNLK

SEQ ID NO: 1145 - protein, 447 aa, Ephedra fragilis
  unsure (1)..(447): unsure at all Xaa locations
LSFPLGNLPNIYNSLIVKGQIGSKEINITCEVQQLLGNNTVRTVAMSATDGLMRGMKVIDTGAPLSVPVGKMTLGRIFNVLGEPVDNLGPIDTSTTFPIHRPAPAFSQLDINLAIFETGIKVVDLLAPYRRGGKIGLFGGAXVGKTVLIMELINNIAKAHGGVSVFGGVGKRTREGNDLYMEMKESGVINEKNIIESKVALVYGQMNEPPGARMKVGLTALTMAEYFRDVNEQDVLLFIDNIFRFVQAGSEVSALLGRMPSAVGYQPTLSTEMGSLQERITSTKKGSITSIQAVYVPADDLTDPAPATTFAHLDATTVLSRGLAAKGIYPAVDPLDSTSTMLQPRIVGEKHYEIAQEVKQTLQRYKELQDIIAILGLDELSEEDRLTVARARKIERFLSQPFFVAEVFTGSPGKYVSLIETTRGFQMILAGDLDGLXEQSFYLIGNI

SEQ ID NO: 1146 - protein, 478 aa, Chloroflexus aurantiacus
MRRYMRRTKIVATLGPATSTPERIAGLIRAGMNVARLNFSHGTHAEHAARIAMVRRAAAEAGRHVAILQDLQGPKIRTGPLENGQPVELVAGQRFVITTEPIVGDAHRVSTTYRALPLDVRPRDRILLSDGLIELVVTGHTDTEVETEVVHGGRLREHQGINLPGVRVSAPAATEKDLADLAFGLEQGVDYVALSFVRRASDVREVKEFIRRAGKQTPVIAKIERPEALDVLPEILAEADGIMVARGDLGVEMPPERVPIVQKQIIAAANQALLPVITATQMLESMIHNPRPTRAEASDVANAIIDGTDAVMLSGETAAGAYPIEAVQMMALIADAVEASYTGGQHSTTPRWSIAPAQSTPRAIAAAACTIANSLPVRFIVVLTQSGASARLVSHYRPEVPILAFCPSEETARRTSLYWGVTPIVIEARDRLDELEQQIVRMMRETGMVRKGDLIVLSGGHPVYRYGPTNFLKVITIE

SEQ ID NO: 1147 - protein, 635 aa, Glycine max
  unsure (1)..(635): unsure at all Xaa locations
MFKLFSDLKMPAVYGARLTTFEDSEKESEYGYVRKVSGPVVVADGMAGAAMYELVRVGHDNLIGEIIRLEGNSATIQVYEETAGLMVNDPVLRTHKPLSVELGPGILGNIFDGIQRPLKTIAKRSGDVYIPRGVSVPALDKDTLXWEFQPKKIGEGDLLXTGGDLYATVXFENSLMQHHIALPPDNMGXITYIAPPGQYSIKDTVLELEFQGVKKKFTMLQTWPVRTPRPVASKLAADTPLLTGQRVLDALFPSVLGGTCAIPGAFGCGKTVISQALSKYSNSDAVVYVGCGERGNEMAEVLMDFPQLTMTLPDGHEESVMKRTTLVCNTSNMPVAAREASIYTGITLAEYFRDMGYNVSMMADSTSRWAEALREISGRLAEMPADSGYPAYLAARLASFYERAGKVKCLGGPERTGSVTIVGAVSPPGGDFSEPVTSATLSIVQVFWGLDKKLAQMKHFPSVNWLISYSKYSTALETFYEQFESCFKKPLHKDREVLQREDDLNEIVQLVGKDALAEGDKXTLETAKLLREDYLAQNAFTPYDKFCPFYKSVWMMRNIIHFYNLANQAVERGAGSDGQKISYTLIKHRMGDLFYRLVSQKFEDPAEGEAALVAKFQKLHEDLTNGFRNLEDETR

SEQ ID NO: 1148 - protein, 290 aa, Arabidopsis thaliana
ISRYKLIKEVGDGTFGSVWRAINKQTGEVVAIKKMKKKYYSWDECINLREVKSLRRMNHPNIVKLKEVIRENDILYFVFEYMECNLYQLMKDRQKLFAEADIKNWCFQVFQGLSYMHQRGYFHRDLKPENLLVSKDIIKIADFGLAREVNSSPPFTEYVSTRWYRAPEVLLQSYVYTSKVDMWAMGAIMAELLSLRPIFPGASEADEIYKICSVIGTPTEETWLEGLNLANTINYQFPQLPGVPLSSLMPSASEDAINLIERLCSWDPSSRPTAAEVLQHPFFQVHLESF

SEQ ID NO: 1149 - protein, 225 aa, Enterococcus faecium
MKIKAALFDLDGVLVDTARYHYEAWLVLANQLSIPFTEKENEQLKGISRTESLERLLSFGKMEQKFSEKEKSAFAEQKNNLYLQAIQKMDETSVLPGAIAVLEYLKKTNIKIGLGSASKNARLILEKTNLTSYFDVLIDGTQVSKAKPDPEVFLKGAQQLNVPPNACLVIEDSEAGCQAALAGNMHVLGIGENINLPSAEYVIPDLTVFDQVRSFWHLSEAVSRI

SEQ ID NO: 1150 - protein, 498 aa, Rheum rhaponticum
MRINPTTSSPGVSTLEKNNLGRVAQIIGPVLDVAFPPGKMPNIYNALVVKGRDTSGHPINVTCEVQQLLGNNRVRAVAMSATDGLTRGMEVIDTGAPLSVPVGGATLGRIFNVLGEPVDNLGPVDTRTTSPIHRSAPAFIQLDTKLSIFETGIKVVDLLAPYRRGGKIGLFGGAGVGKTVLIMELINNIAKAHGGVSVFGGVGERTREGNDLYMEMKESGVINEENIPESKVALVYGQMNEPPGARMRVGLTALTMAEYFRDVNKQDVLLFIDNIFRFVQAGSEVSALLGRMPSAVGYQPTLSTEMGSLQERITSTKQGSITSIQAVYVPADDLTDPAPATTFAHLDATTVLSRALAAKGIYPAVDPLDSTSTMLQPRIVGEAHYKIAQRVKQTLQRYKELQDIIAILGLDELSEEDRLTVARARKIERFLSQPFFVAEVFTGSPGKYVGLAETIRGFQLILSGELDGLPEQAFYLVGNIDEATAKAMNFEMENKLKK

SEQ ID NO: 1151 - protein, 513 aa, Glycine max; identical to SEQ ID NO: 394

SEQ ID NO: 1152 - protein, 224 aa, Pseudomonas aeruginosa PAO1
MPHPIDALISDCDGVLVDSEVIAERVMYEALSAYAPLEELQRLLEGTFGLTSRDILDRVEKHFGLRIPDSFNREVRQRSEEMVAQVQPIPGAREALLALDLPVAVASNSRRHSLERSLARAGLSELIGERLASADMVALPKPAPDVYLHAASLLGVAPERCLVVEDSSTGTRAALAAGMRVIGFVGAGHIPAGHAEVLRELGAIAIVEHMRELPETVARLRRTV

SEQ ID NO: 1153 - protein, 222 aa, Picea mariana
MGRGKIEIKRIENTTNRQVTFCKRRNGLLKKAYELSVLCDAEVALIVFSSRGRLYEFANHSVKRTIERYKKTCVDNNHGGAISESNSQYWQQEAGKLRQQIEILQNANRHLMGDGLTALNIKELKQLEVRLEKGIGRVRSKKNEMLLEEIDIMQRREHILIQENEILRSKIAECQNSHNTSMLSAPEYDALPAFDSRNFLHANLIDAAHHYAHQEQTTLQLG

SEQ ID NO: 1154 - protein, 484 aa, Celastrus orbiculatus
  unsure (1)..(484): unsure at all Xaa locations
GVSALEKKNLGRIVQIIGPVLDVAFPPGKMPNIYNALVVKGRDTSGHTINWIWEVQKLLGNNQVRAVAMSATDGLMRGMGVIDTGAPLSVPVGGATLGRIFNVLGEPVDNLGPVDTRTTSPIHKSAPAFIQLETKLSIFETGIKVVDLLAPYRRGGKIGLFGGAGVGKTVLIMELINNIAKAHGGVSVFGGVGERTREGNDLYMEMKESGVINEQNIAESKVALVYGQMNEPPGARMRVGLTALTMAEYFRDVNEQDVLLFIDNIFRFVQAGSEVSALLGRMPSAVGYQPTLSTEMGSLQERITSTKXGSITSIQAVYVPADDLTDPAPATTFAHLDATTVLSRGLAAKGIYPAVDPLDSTSTMLQPRIVGEEHYETAQRVKQTLQRYKELQDIIAILGLDELSEEDRLTVARARKIERFLSQPFFVAEVFTGSPGKYVGLAETIRGFKLILSGELDGLPEQAFYLVGNIDEATTKATNLEMEN

SEQ ID NO: 1155 - protein, 222 aa, Pseudomonas aeruginosa PAO1
MDGVLISSREAIAAAWSRVAGEQGVALGPDCLRDHVHGRPGGYTLDYLFGHLPMERRRILKQRVDALEEGADCPLLPGVAAVIRQLRWLDVPLALVTSSWPARIDHVLRQHDLQAAFRTLVSRDDVVHGKPAPDGYRLAAARLGVAPSRCLVFEDSLSGVQAACAAGATCVAIGEESGLLAAGARWSVRDFRELRIVREDDRLYCQHRHPATTGSERSVGVP

SEQ ID NO: 1156 - protein, 427 aa, Buchnera aphidicola str. Sg (Schizaphis graminum)
MTDKSKDNSKKLLQCSFCGKNQKEVKKLIAGPAVYICDECIRLCNNIIQETKTTKKIEDDELSYLPTPHEIKKHLDNYVIGQNHTKKVLSVAVYNHYQRIRNVSKNKDNVELGKSNILLIGPTGSGKTLLAETLAKLLNVPFSIADATTLTEAGYVGEDVENVIQKLLQKCEYNVKKAELGIVYIDEIDKISRKSDNPSITRDVSGEGVQQALLKLIEGTLASIPPQGGRKHPQQEFLQVNTANILFICAGAFSELSKIISKRIDTGNTIGFNCNLKKQKKKKSEQYFLQQVQSKDLIKFGLIPEFIGRLPIITILKELNETALVQILCKPKNALIKQYQTLFNLEKVKLEFTKEAVTSIAKKALSKKTGARGLRSIIENILLDIMYELPSMKNVEKILIDESVVNSHSLPKIIYEEKNKSKKASGE

SEQ ID NO: 1157 - protein, 456 aa, Ruta graveolens
IGPVLDVAFPPGKMPNIYNALVVKGRDTGGQPINVTCEVQQLLGNNRVRAVAMSATDGLTRGMEVIDTGAPLSVPVGGATLGRIFNVLGEPVDNLGPVDTRTTSPIHKSAPAFIQLDTRLSIFETGIKVVDLLAPYRRGGKIGLFGGAGVGKTVLIMELINNIAKAHGGVSVFGGVGERTREGNDLYMEMKESGVINEQNIAESKVALVYGQMNEPPGARMRVGLTALTMAEYFRDVNEQDVLLFIDNIFRFVQAGSEVSALLGRMPSAVGYQPTLSTEMGSLQERITSTKEGSITSIQAVYVPADDLTDPAPATTFAHLDATTVLSRGLAAKGIYPAVDPLDSTSTMLQPRIVGEEHYDTAQRVKETLQRYKELQDIIAILGLDELSEEDRLTVARARKIERFLSQPFFVAEVFTGSPGKYVGLAETIRGFKLILSGELDGLPEQAFYLVGNIDE

SEQ ID NO: 1158 - protein, 470 aa, Escherichia coli O157:H7 EDL933
MKKTKIVCTIGPKTESEEMLAKMLDAGMNVMRLNFSHGDYAEHGQRIQNLRNVMSKTGKTAAILLDTKGPEIRTMKLEGGNDVSLKAGQTFTFTTDKSVIGNSEMVAVTYEGFTTDLSVGNTVLVDDGLIGMEVTAIEGNKVICKVLNNGDLGENKGVNLPGVSIALPALAEKDKQDLIFGCEQGVDFVAASFIRKRSDVIEIREHLKAHGGENIHIISKIENQEGLNNFDEILEASDGIMVARGDLGVEIPVEEVIFAQKMMIEKCIRARKVVITATQMLDSMIKNPRPTRAEAGDVANAILDGTDAVMLSGESAKGKYPLEAVSIMATICERTDRVMNSRLEFNNDNRKLRITEAVCRGAVETAEKLDAPLIVVATQGGKSARAVRKYFPDATILALTTNEKTAHQLVLSKGVVPQLVKEITSTDDFYRLGKELALQSGLAHKGDVVVMVSGALVPSGTTNTASVHVL

SEQ ID NO: 1159 - protein, 251 aa, Thermococcus kodakaraensis
MFEKGSLIPYLTAGDPSVEKTLEFLLAVEEFAGLIELGIPFSDPMADGKTIQESHYRALRNGFKLDDTFRILREFRRHSSTPVILMTYYNPVFRTGVKKFLGEAKASGADGILVVDLPVSHAGEFLDAAKEEGLKTVFLAAPNTPDERLREIDKASTGFVYLISLYGTTGARDRLPETAFEFVRRARKICNNKLAVGFGVSRREQVEELLKAGADGVVVGSALIELISRSENPVEELRRKVAELSGYSRAL

SEQ ID NO: 1160 - protein, 466 aa, Pirellula sp.
MNAEYGVGARLPAKTSLIVIRRRRGTSPQCWTHKSKESCMPTKETSNSRRGSAATKKNAFCSFCRKSYRDVGPLVEGPGDVYICAECIDLCQSILDQEQRRRGPSKSLFSDIPSPRSIVEHLDNYVIGQGSAKRVLAVAVHNHYKRLSNGADGSNGEVEIEKSNILLAGPTGSGKTLLARSLARMLNVPFAIGDATTLTEAGYVGEDVENLLLKLLHAADFDVEAAQRGILYIDEVDKIGSTNGNVSITRDVSGEGVQQSLLKMLEGTVANVPPQGGRKHPEQQYIQLDTSNILFICGGTFVGIEEIIRRRLGHRTLGFGEGANVRNEQTPGELVAQVQTEDILKFGLIPELVGRMPVISYLQPLDLEGLIQVLTEPKNSLVKQYQALFAMENCELEFTEEALHAIAKKAVDKGVGARGLRGIMEDVMLDIMYDLPEQEAGKVYTIDEAIVTGKQDLFKMPTTKSA

SEQ ID NO: 1161 - protein, 445 aa, Glycine max
RVSSRRPPPPRGLTVGTATTHYYASEEFKIKQHKTKSFTCSPQEVISGGDYKQSTYCHLLLGLYFSDQVEFITSAFIYSMVQAFTTFEELWREICNDIRDGTLSSRIKSSKMRKAALDIISPSPNLASKLEDSCKELEGVDWFGLIPKLWPNAKYVYSIMTGSMQPYLKKLRHYANGLPLVSAEYGSTESWIGVNVDPSLPPEDVTFAVVPTFSYFEFIPLHRNEKNFSSGGDDFIEDKPIPLSQIKVGQEYEVVLTTFTGLYRCRLGDVVEVAGFHNGTPKLNFVCRRKLILTINIDKNTEKDLQLVVERGSHILNMTSRGELVDFTSYADVSKQPGHYVIYWEIKGEVEDKILGACCNEMDKSFADHGYVVSRKTNSIGPLELCVLESGTFKKILDSFIANGAALSQFKTPRCTNNHVLLKILNTCTTKKFRSTAYNSCSMEQ

SEQ ID NO: 1162 - protein, 623 aa, Daucus carota
MPSVYGDRLTTFEDSEKESEYGYVRKVSGPVVVADGMGGAAMYELVRVGHDNLIGEIIRLEGDSATIQVYEETAGLMVNDPVLRTHKPLSVELGPGILGNIFDGIQRPLKTIAKRSGDVYIPRGVSVPALDKDTLWEFQPKKIGEGDLLTGGDLYATVFENSLMQHHVALPPDAMGKITYVAPAGQYSLKDTVLELEFQGVKKQFTMLQTWPVRTPRPVASKLAADTPLLTGQRVLDALFPSVLGGTCAIPGAFGCGKTVISQALSKYSNSDTVVYVGCGERGNEMAEVLMDFPQLTMTLPDGREESVMKRTTLVANTSNMPVAAREASIYTGITIAEYFRDMGYNVSMMADSTSRWAEALREISGRLAEMPADSGYPAYLAARLASFYERAGKVKCLGGPERNGSVTIVGAVSPPGGDFSDPVTSATLSIVQVFWGLDKKLAQRKHFPSVNWLISYSKYSTALESFYEKFDSDFIDIRTKAREVLQREDDLNEIVQLVGKDALAETDKITLETAKLLREDYLAQNAFTPYDKFCPFYKSVWMMRNIIHFYNLANQAVERGAGMDGQKISYTLIKHRLGDLFYRLVSQKFEDPAEGEDVLVGKFKKLHDDLTSGFRNLEDETR

SEQ ID NO: 1163 - protein, 484 aa, Microbulbifer degradans 2-40
MEQSMFRRTKIVSTLGPATDEPGILEKLILAGVNVVRLNFSHGSPEDHKRRADEVRSLAAKHGKFVAVLGDLQGPKIRIARFADGPISLAVGDKFLLDASLERDAGNQHQVGIDYKELPNDVNPGDSLLLDDGRVVLKVLSVEGTKVHTEVTVAGKLSNNKGINRQGGGLTAPALTDKDRADIKTAVAIDVDYLAVSFPRSAEDMNLARQLVVEAGGNIHLVAKIERAESVENQEVLDDLIRASDAVMVARGDLGVEIGDAALIGMQKLIIERARALNRCVITATQMMESMISSPLPTRAEVFDVANAVLDGTDAVMLSAETAAGQFPVQTVEAMVRVILGAEKHPRAETRPVRADGDYSAIDESIALAAMYTAHQLKGVKCIASMTESGSTPMLMSRFGARLPIFAFSRDIRTLRRAALFRGVQTILFDNNAIPPGEMYDRALEIMREQKIIEDGDLVILSKGDTSEHGGTNTMKILQVGSTN

SEQ ID NO: 1164 - protein, 446 aa, Nostoc punctiforme
MSKYDSHLKCSFCGKSQEQVRKLIAGPGVYICDECVDLCNEILDEELLDTNGAAAQPTPRAEPPQKRRTQSSSISFNQIPKPREIKKYLDEHVIGQDEAKKVLSVAVYNHYKRLAVIQSKATGKAAADDAVELQKSNILLIGPTGCGKTLLAQTLAKILDVPFAVADATTLTEAGYVGEDVENILLRLLQVADLDIEEAQRGIIYIDEIDKIARKSENPSITRDVSGEGVQQALLKMLEGTIANVPPQGGRKHPYQDCIQIDTSNILFVCGGAFVGLEKVVDQRVGKKAIGFVQPGEGQTKEKRAADTLRHLAPDDLVKFGMIPEFIGRVPMVAVVDPLDEEALMAILTQPRSALVKQYQKLLKMDNVQLDFKPDALRAIAQEAYRRKTGARALRGIVEELMLDVMYELPSRKDVTRCTVTREMVEKRSTAELIIHPSSLPKPESA

SEQ ID NO: 1165 - protein, 322 aa, Bacillus subtilis subsp. subtilis str. 168
MLERAVTYKNNGQINIILNGQKQVLTNAEAEAEYQATLQKNEAKHGILKEIEKEMSALVGMEEMKRNIKEIYAWIFVNQKRAEQGLKVGKQALHMMFKGNPGTGKTTVARLIGKLFFEMNVLSKGHLIEAERADLVGEYIGHTAQKTRDLIKKSLGGIWFIDEAYSLARGGEKDFGKEAIDTLVKHMEDKQHEFILILAGYSREMDHFLSLNPGLQSRFPISIDFPDYSVTQLMEIAKRMIDEREYQLSQEAEWKLKDYLMTVKSTTSPIKFSNGRFVRNVIEKSIRAQAMRLLMGDQYLKSDLMTIKSQDLSIKEEASGSA

SEQ ID NO: 1166 - protein, 1046 aa, Saccharomyces pastorianus
ISLEDHAESEYGAIYSVSGPVVIAENMIGCAMYELVKVGHDNLVGEVIRIDGDKATIQVYEETAGLTVGDPVLRTGKPLSVELGPGLMETIYDGIQRPLKAIKEESQSIYIPRGIDTPALDRTIKWQFTPGKFQVGDHISGGDIYGSVFENSLISSHKILLPPRSRGTITWIAPAGEYTLDEKILEVEFDGKKSDFTLYHTWPGRVPRPVTEKLSADYPLLTGQRVLDALFPCVQGGTTCIPGAFGCGKTVISQSLSKYSNSDAIIYVGCFAKGTNVLMADGSIECIENIEVGNKVMGKDGRPREVIKLPRGSETMYSVVQKSQHRAHKSDSSREMPELLKFTCNATHELVVRTPRSVRRLSRTIKGVEYFEVITFEMGQKKAPDGRIVELVKEVSKSYPVSEGPERANELVESYRKASNKAYFEWTIEARDLSLLGSHVRKATYQTYAPILYENDHFFDYMQKSKFHLTIEGPKVLAYLLGLWIGDGLSDRATFSVDSRDTSLMERVTEYAEKLNLCAEYKDRKEPQVAKTVNLYSKVVRGNGVRNNLNTENPLWDAIIGLGFLKDGVKNIPSFLSTDNIGTRETFLAGLIDSDGYVTDEHGIKATIKTIHTSVRDGLVSLARSLGLVASVNAEPAKVDMNGTKHKISYAIYMSGGDVLLNVLSKCAGSKKFRPAPVATFVRECQGFYFELQELKENDYYGITLSDDSDHQFLLANQVVVHNCGERGNEMAEVLMEFPELYTEMSGTKEPIMKRTTLVANTSNMPVAAREASIYTGITLAEYFRDQGKNVSMIADSSSRWAEALREISGRLGEMPADQGFPAYLGAKLASFYERAGKAVALGSPDRTGSVSIVAAVSPAGGDFSDPVTTATLGITQVFWGLDKKLAQRKHFPSINTSVSYSKYTNVLNKFYDSNYPEFPVLRDRMKEILSNAEELEQVVQLVGKSALSDSDKITLDVATLIKEDFLQQNGYSTYDAFCPIWKTFDMMRAFISYHDEAQKAVANGANWSKLADSTGDVKHAVSSSKFFEPSRGEKEVHGEFEKLLS

SEQ ID NO: 1167 - protein, 498 aa, Cleome hassleriana
MRINPTTSDSGVSMLEKKNLGRIAQIIGPVLDVAFPPGKMPNIYNALVVKGRDTVGQEINVTCEVQQLLGNNRVRAVAMSATEGLTRGMEVIDMGTPLSVPVGGATLGRIFNVLGEPVDNLGPVDTRTTSPIHKSAPAFIQLDTKLSIFETGIKVVDLLAPYRRGGKIGLFGGAGVGKTVLIMELINNIAKAHGGVSVFGGVGERTREGNDLYMEMKESGVINEQNLAESKVALVYGQMNEPPGARMRVGLTALTMAEYFRDVNEQDVLLFIDNIFRFVQAGSEVSALLGRMPSAVGYQPTLSTEMGSLQERITSTKKGSITSIQAVYVPADDLTDPAPATTFAHLDATTVLSRGLAAKGIYPAVDPLDSTSTMLQPRIVGEEHYETAQRVKQTLQRYKELQDIIAILGLDELSEEDRLTVARARKIERFLSQPFFVAEVFTGSPGKYVGLAETIRGFKLILSGELDSLPEQAFYLVGNIDEATAKATNLEMESKLKK

SEQ ID NO: 1168 - protein, 491 aa, Mayaca fluviatilis
SSSAAVSTLDEKNLGRIAQIIGPVLDVIFPPGRMPNIYNALVVKGRDTDGRQINVTCEVQQLLGNNRVRAVAMSATDGLMRGMEVIDTGAALSVPVGGTTLGRIFNVLGEPIDNLGPVDTSTTSPIHRSAPAFIQLDTKLSIFETGIKVVDLLAPYRRGGKIGLFGGAGVGKTVLIMELINNIAKAHGGVSVFGGVGERTREGNDLYMEMKESGVINENNLAESKVALVYGQMNEPPGARMRVGLTALTMAEYFRDVNGQDVLLFIDNIFRFVQAGSEVSALLGRMPSAVGYQPTLSTEMGSLQERITSTKEGSITSIQAVYVPADDLTDPAPATTFAHLDATTVLSRGLAAKGIYPAVDPLDSTSTMLQPRIVGEEHYEIAQRVKQTLQRYKELQDIIAILGLDELSEEDRLTVARARKIERFLSQPFFVAEVFTGSPGKYVGLAETIRGFQLILSGELDSLPEQAFYLVGNIEEATAKAMNLEGESKLK

SEQ ID NO: 1169 - protein, 419 aa, Listeria monocytogenes EGD-e
MFKFNDEKGQLKCSFCGKTQDQVRKLVAGPGVYICDECIELCNEIIEEELGISEFVDFGEVPKPQEIRHILSDYVIGQERAKKALAVAVYNHYKRINSNETKEDEVELSKSNICLIGPTGSGKTLLAQTLARILNVPFAIADATSLTEAGYVGEDVENILLKLIQSADYDVEKAEKGIIYIDEIDKVARKSENPSITRDVSGEGVQQALLKILEGTVASVPPQGGRKHPHQELIQIDTGNILFIVGGAFDGIEQIVKNRMGEKVIGFGTDNAKLKDDETYLSRVVPEDLLKFGLIPEFIGRLPVIATLEQLDEAALVSILTEPKNALVKQYKRMLELDDVELEFEPTALIEIAKEAIERKTGARGLRSIIEQIMLEVMFEIPSRDDITKCIITEKAARGEEEPQLQLEDGSIIPIKTSA

SEQ ID NO: 1170 - protein, 513 aa, Glycine max
MLPRSRTLPSRIHQGIIEERHDVRPYVQVEVRPNNIQTETQAMNIQSNYSKCFDDDGRLKRTGTFWTATAHIITAVIGSGVLSLAWAVAQLGWVAGPVVMFLFAVVNLYTSNLLTQCYRTGDSVNGHRNYTYMEAVKSILGGKKVKLCGLIQYINLFGVAIGYTIAASVSMMAIKRSNCYHSSHGKDPCHMSSNGYMITFGIAEVIFSQIPDFDQVWWLSIVAAIMSFTYSSVGLSLGVAKVAENKTFKGSLMGISIGTVTQAGTVTSTQKIWRSLQALGAMAFAYSFSIILIEIQDTIKSPPAEHKTMRKATTLSIAVTTVFYLLCGCMGYAAFGDNAPGNLLTGFGFYNPYWLLDIANLAIVIHLVGAYQVFSQPLFAFVEKWSVRKWPKSNFVTAEYDIPIPCFGVYQLNFFRLVWRTIFVLLTTLIAMLMPFFNDVVGILGAFGFWPLTVYFPIDMYISQKKIGRWTSRWIGLQLLSVSCLIISLLAAVGSMAGVVLDLKTYKPFKTSY

SEQ ID NO: 1171 - protein, 312 aa, Arabidopsis thaliana
MAIAFKSGVFFLQSPKSQIGFRHSSPPDSSLSFKRFTPMASLSTSSPTLGLADTFTQLKKQGKVAFIPYITAGDPDLSTTAEALKVLDACGSDIIELGVPYSDPLADGPVIQAAATRSLERGTNLDSILEMLDKVVPQISCPISLFTYYNPILKRGLGKFMSSIRAVGVQGLVVPDVPLEETEMLRKEALNNDIELVLLTTPTTPTERMKRIVDASEGFIYLVSSIGVTGARSSVSGKVQSLLKDIKEATDKPVAVGFGISKPEHVKQIAGWGADGVIVGSAMVKLLGDAKSPTEGLKELEKLTKSLKSALL

SEQ ID NO: 1172 - protein, 490 aa, Cressa truxillensis
  unsure (1)..(490): unsure at all Xaa locations
MRSNPTXSGSEVSAVEKKNLGRIVQIIGPVLDVAFPPGKMPYIYNALVVQGRDNEQMNVTCEVQQILGNNRVRAVAMSDTDGLMRGMEVIDTGVSISVPVGGATLGRIFNVLGEPVDKLGPVDTKTTSPIHRSAPAFIQLDTKLSIFETGIKVVDLLAPYRRGGKIGLFGGAGVGKTVLIMELINNIAKAHGGVSVFGGVGERTREGNDLYMEMKESGVINEENIAESKVALVYGQMNEPPGARMRVGLTALTMAEYFRDVNEQDVLLFIDNIFRFVQAGSEVSALLGRMPSAVGYQPTLSTEMGTLQERITSTKEGSITSIQAVYVPADDLTDPAPATTFAHLDATTVLSRGLAAKGIYPAVDPLDSTSTMLQPRIVGEEHYETAQRVKETLQRYKELQDIIAILGLDELSEEDRLTVARARKIERFLSQPFFVAEVFTGSPGKYVGLAETIRGFQLILSGELDGLPEQAFYLVGNIDEATAKAMNLKT

SEQ ID NO: 1173 - protein, 422 aa, Rhodospirillum rubrum
MSKSSGGDSKNTLYCSFCGKSQHEVRKLIAGPTVFICDECVELCMDIIREEHKTSLVKSRDGVPSPKDILKVLDDYVIGQQHAKKVLSVAVHNHYKRLSQAGKNSDVELAKSNILLIGPTGCGKTLLAQTLARILDVPFTMADATTLTEAGYVGEDVENIILKLLQASDYNVERAQRGIVYIDEIDKISRKSDNPSITRDVSGEGVQQALLKIMEGTVASVPPQGGRKHPQQEFLQVDTTNILFICGGAFAGLDRIISARGKGSSIGFGADVRDPEARRTGEVLRAVEPEDLLKYGLIPEFVGRLPVLATLDDLDEDALVDILTTPKNALVKQYQRLFEMESTQLSFKEDALRCIALKAIARKTGARGLRSIMEGILLDTMFDLPGMEGVEEVVVNKEVVEGRAKPLFIYSDQRTSADGASA

SEQ ID NO: 1174 - protein, 442 aa, Triticum aestivum
RTRGRRTNNKQVGFLTNRHVAVDLDYPNQKMSHPLPPNLGPGVYLGAVERASSFITDDVWYGIYAGTNPETFVRADGAFIPFADDFDISTVTTIVREVGEIGDVKIIDLQCPIKSLIGRQVCKVGRSSGHTTGTVMAYALEYNDEKGICFFTDLLVVGENRQTFDLEGDSGSLIILTSQDGEKPRPIGIIWGGTANRGRIKLTSEYGPENWTTGVDLGRLLDRLELDLIINDESLKDAVQEQRKAFVAAITFAIGEASAVTVTAPEATPAEKAEEIFEPLGIQIQQLPRHDLTSATTEGEGAANTPSDMEERQFISNFVGMSPVRRDHDARRSIANLNNPSEEELAMSLHLGDREPKRLRLDPESSLDPEKQPHPDPEPSLDLEERPHPDPEMMSLDLEKQPRPDPEPGLDLERQPRSDPEPCLDLEKRLPADPEPSMDLEK

SEQ ID NO: 1175 - protein, 326 aa, Brassica napus
MTNVTGDRNGDGRSTAVTESSPPSDPPIRVYADGIYDLFHFGHARSLEQAKKSFPNTYLLVGCCNDDTTHKYKGKTVMNDQERYESLRHCKWVDEVIPDAPWVINQEFLDKHRIAYVAHDALPYADASGAGKDVYEFVKKVGRFKETKRTEGISTSDIIMRIVKDYNQYVMRNLDRGYSREDLGVSFVKEKRLRVNMRLKKLQEKVKEQQEKVGEKIQTVKMVRNEWVENADRWVAGFLEMFEEGCHKMGTAIRDRIQEKLMRQESKELLEKGQNGQREDTEEQFYEEYFEHDIVDSCEDNEDDEEEYYDEIEEQCSSASKALKSN

SEQ ID NO: 1176 - protein, 589 aa, Lactobacillus gasseri
MKKTKIVSTLGPASNDVETITKLAEAGANVFRFNFSHGDHEEHRARMNMVREIEKKTGKLLGIALDTKGAEIRTTEQEGGKFTINTGDTIRISMDDTKKGNKDMIHVTYDGLYDDTHVGGHVLIDDGLVDLLIKEKDDAKRELVCEAQNTGLIGSKKGVNAPGVEIRLPGITEKDTNDIKFGLKEGINFIFASFVRKAQDVLDIRQLLEEAHCEYVKIFPKIESQEGIDNIDEILKVSDGLMVARGDMGVEIPFINVPFVQKELIRRCNALGKPVITATQMLDSMQENPRPTRAEVTDVANAVLDGTDATMLSGESANGLYPVKAVKAMAEIDMRTEKQLAKRNKLALQRFEEYKGSNVTEAIGESVVRTAEELGVKTIIAATESGYTARMISKYRPNADIIAMTFDEKIEHSLGVVWGVKPMLVEKPKTTEEMFDKAAELAKETGLAKDGDLVIIVAGVPLGETGTTNLMKLQLIGTQLVKGLGVGEQSVIGKAVVATSAEEANSKVQDGDILVAKTTDKDYLPAIKKASGMVVEASGLTSHAAVVGLSLGIPVVVGATDAVEKIKDGSKITVDARRGAVYQGEATNL

SEQ ID NO: 1177 - protein, 547 aa, Torulaspora globosa
ISQSLSKYSNSDVIIYVGCFAKGTPVMMHDGSVKAIETINVGEEVMGADGLGRKIVGLPRGREVMYKVSQKTEHRAYETDETRSAPVGLFEYTCNATHKLVVRTPRSCRTLNRTMKGVEYYEVVFFDLAKEKLKDGREIEVVKEISRSYPVTEGPERAAEIMKEYQEAGAGKQFFEWTIEARDVGALGAHVRKATHQVYAPVLYESDFFFHYVKDSKFCLKSEAPFALAYLLGLWVGDGLSDRAVFSVDSEDTTLFDRIIDFADILDLSAEYKDREIPKRAKTVGLFPKTIRGNDIGRNLNTDNPLWNAIVDLGYLKGGVKHVPSYLLTDSIPHREVFLAGLIDSDGYVRGEEAPAATIKTIHKTVMEGTVAVARSLGLTVSVNIEEAKVDKDGVNHRPAYAIYISGGDALLSVLANCASAKKHRAAPTKEVVRGLNEVYFEMKELQEDDYYGITLSENSDHQFMLANQLVVHNCGERGNEMAEVLMEFPELYTEKNGKKEPIMKRTTLVANTSNMPVAAREASIYTGITLAEYFRDQGRDVSMIAD

SEQ ID NO: 1178 - protein, 426 aa, Vibrio cholerae
MTDKSKEGGSSKLLYCSFCGKSQHEVRKLIAGPSVYICDECVDLCNDIIREEIKDVLPKKESAALPTPRKIREHLDDYVIGQEHAKKVLAVAVYNHYKRLRNGDTTSEGVELGKSNILLIGPTGSGKTLLAETLARLLDVPFTMADATTLTEAGYVGEDVENIIQKLLQKCDYDVAKAERGIVYIDEIDKISRKSENPSITRDVSGEGVQQALLKLIEGTVASVPPQGGRKHPQQEFLQVDTSKILFICGGAFAGLDKVIEQRVATGTGIGFGADVRSKDNSKTLSELFTQVEPEDLVKYGLIPEFIGRLPVTATLTELDEAALIQILCEPKNALTKQYAALFELENVDLEFREDALKAIAAKAMKRKTGARGLRSILEAVLLETMYELPSMEEVSKVVIDESVINGESAPLLIYSANESQAAGAE

SEQ ID NO: 1179 - protein, 478 aa, Brucella melitensis 16M
MKRNRKVKILATLGPASGEEAVIRKLFEAGADVFRINMSHADHDLMRTLVKRIRNVEKELGRPIGILADLQGPKLRVGKFKDGKVDLVPGQTFTLDNNEALGDETRVFLPHPEILEAVEPGHRLLIDDGKLHLVAEACDGKSIRCKVVSGTRISDRKGVSLPDTTLGVGALTEKDRCDLDAVLKEEIDWVALSFIQRPEDLAEVRKVSRGKVGLMSKIEKPQAVTRLDEIIELSDALMVARGDLGVEVPLENVPGIQKQITRKARRAGKPVVVATQMLESMITAPVPTRAEVSDVATAVFEGADAIMLSAESASGQYPVEAVATMNRIAEQVEREPTYSTIIDAQRAMPEPTGADAISLAARQIAETLKLSAIVTYTASGTTGLRAARERPRTPIIALSPVVDTARKLSLVWGLHCVITDDAHDLEDMVNHACEIVFHEEFGKAGDRVIITAGVPFGTPGATNMLRIAYIGADGKSGI

SEQ ID NO: 1180 - protein, 219 aa, Vibrio cholerae
MGTMNFQAAIFDMDGLLLDTERVCMRVFQEACTACGLPFRQEVYLSVIGCNAKTINGILSQAYGEDLPRLHNEWRQRYNAVVMHEAIPHKDGVIALLEWLKARSIPVAVATSTQKEVALIKLQLAGLDHYFANITTGCEVTQGKPHPEIYLLAAERLGVEPQQCLAFEDSNNGIKAAMAAQMHAFQIPDLVKPSPEVIALGHPICTSLNEVIDLLSPNH

SEQ ID NO: 1181 - protein, 412 aa, Aquifex aeolicus VF5
MAVKVNKEFCSFCGKRQDEVLILIAGPNNTYICDECVEKCYQIVRENKKTSYNFELKDIPKPEQIKKILDEYVIGQERAKKILSVAVYNHYKRIKAKEAGLSLDDVELEKSNILLIGPTGSGKTLLARTLAKILNVPFAIADATSLTEAGYVGEDVENVLVRLLQACDYDVKAAQKGIVYIDEIDKIAKKSGINPSITRDVSGEGVQQALLKIVEGSVVNVPPQGGRKHPHQEFIQVDTTDILFICGGAFVGLEDIIKQRLGKSRVGFEAEIKKVDKEQDLLELVEPDDLIRFGMIPEFIGRFPVIATLRELTEDELVRILVEPKNALVKQYQKLFELEGVKLTFTEKALREIAKEAIRRKTGARGLRAIMEDIMADIMFEVPSLPGVKEVIIDENVVKNKEKPKLIFEQAV

SEQ ID NO: 1182 - protein, 498 aa, Exacum affine
  unsure (1)..(498): unsure at all Xaa locations
XXXNPTTSGSGVSALEKKNLGRIVQIIGPVLDVAFPPGKMPNIYNALVVKGRDTLGQSINVTCEVQQLLGNNRVRAVAMSATDGLTRGMEVIDTGAPLSVPVGGATLGRIFNVLGEPVDNLGPVDTRTISPIHRSAPAFIQLDTKLSIFETGIKVVDLLAPYRRGGKIGLFGGAGVGKTVLIMELINNIAKAHGGVSVFGGVGERTREGNDLYMEMKESGVINEENISESKVALVYGQMNEPPGARMRVGLTALTMAEYFRDVNEQDVLLFIDNIFRFVQAGSEVSALLGRMPSAVGYQPTLSTEMGSLQERITSTKEGSITSIQAVYVPADDLTDPAPATTFAHLDATTVLSRGLAAKGIYPAVDPLDSTSTMLQPRIVGEEHYETAQRVKQTLQRYKELQDIIAILGLDELSEEDRLTVARARKIERFLSQPFFVAEVFTGSPGKYVGLAETIRGFQLILSGELDGLPEQAFYLVGNIDEATAKAINLEMENNLKK

SEQ ID NO: 1183 - protein, 856 aa, Neurospora crassa
MAPKQDTPFRSADMSMVQLYISNEIGREVCNALGELGLVHFRDLNSELSAFQRAFTQDIRRLDNVERQLRYFHSQMEKAGIPLRKFDPDVDILTPPTTTEIDELAERAQTLEQRVSSLNESYETLKKREVELTEWRWVLREAGGFFDRAHGNVEEIRASTDNDDAPLLQDVEQHNTAADVERSFSGMNIGFVAGVIGRDRVDAFERILWRTLRGNLYMNQAEIPEPLIDPTINEPVLKNVFVIFAHGKEILAKIRRISESMGAEVYNVDEHSDLRRDQVHEVNARLEDVQNVLRNTQQTLEAELAQISQSLSAWMITISKEKAVYNTLNLFSYDRARRTLIAEGWCPTNDLPLIRSTLQDVNNRAGLSVPSIINEIRTNKTPPTYLKTNKFTEAFQTIVNAYGTATYQEVNPAIPVIVTFPFLFAVMFGDFGHALIMLCAALAMIYWEKPLKKVTFELFAMVFYGRYIVLVMAVFSVYTGLIYNDVFSKSMTLFDSQWKWVVPENFKEGMTVKAVLREPNGYRYPFGLDWRWHGTENELLFINSYKMKMAIILGWAHMTYSLCFSYINARHFKRPIDIWGNFVPGMIFFQSIFGYLVLCIIYKWSVDWFGTGRQPPGLLNMLIYMFLQPGTLDGGVELYPGQATVQVILLLLAVIQVPILLFLKPFYLRWENNRARAKGYRGIGERSRVSALDEDDEEDPSNGDDYEGAAMLTHDEHGDGEHEEFEFGEVMIHQVIHTIEFCLNSVSHTASYLRLWALSLAHQQLSAVLWSMTMAKALESKGLGGAIFLVVAFAMFFVLSVIILIIMEGVSAMLHSLRLAWVESFSKFAEFGGWPFTPFSFKQQLEESEELKEYIG

SEQ ID NO: 1184 - protein, 473 aa, Clostridium acetobutylicum
MQKTKMIFTVGPASETEEIVTAFIKAGMNASRHNFSHGDHAEHGGRIALVKKVRAKLNKPVAICLDTKGPEIRTGDFNPSKLELQKGSKFTIVCGEEIVGDATKCSISYKDLYKDVKPGNTILIDDGLVGLTVEAIEGTNVICTVANTGLVGSHKGVNVPNVSIQLPAMTEKDKSDLIFGCKEEIDMVSASFIRKPEDVLAIRKVLNENGGENIQIFSKIENQEGVDNIDAIIEVSDGIMVARGDMGVEIPIQRVPLIQKMIIKKCNAVGKPVITATQMLDSMMRNPRPTRAEASDIANAIFDGTDAIMLSGESANGSYPIEAVTTMAKIAQEAENEINYDKFLAERKGNEKKNTSDVISLGTCTAAADLEASAIITATQTGSTARTVSKYRPKAPVIAVTPSEKVARKLAMSWGVHPIISDKFGSTDELISTSVDKALEAGYVQKGDLVVVAAGVPTNVSGTTNMLKVQVVE

SEQ ID NO: 1185 - protein, 489 aa, Paracryphia alticola
GSGVSTLEKKNQGRIAQIIGPVLDVAFPPGKMPNIYNALVVKGRDTVGQPINVTCEVQQLLGNNRVRAVAMSATDGLMRGMEVIDTGAPLSVPVGGATLGRIFNVLGEPVDNLGPVDTRTTSPIHRSAPAFIQLDTKLSIFETGIKVVDLLAPYRRGGKIGLFGGAGVGKTVLIMELINNIAKAHGGVSVFGGVGERTREGNDLYMEMKESGVINEQNIAESKVALVYGQMNEPPGARMRVGLTALTMAEYFRDVNEQDVLLFIDNIFRFVQAGSEVSALLGRMPSAVGYQPTLSTEMGSLQERITSTKEGSITSIQAVYVPADDLTDPAPATTFAHLDATTVLSRGLAAKGIYPAVDPLDSTSTMLQPRIVGEEHYEIAQRVKQTLQRYKELQDIIAILGLDELSEEDRLTVARARKIERFLSQPFFVAEVFTGSPGKYVGLAETIRGFQLILSGELDGLPEQAFYLVGNIDEATAKAMNLEMESNLK

SEQ ID NO: 1186 - protein, 586 aa, Thermotoga neapolitana
MRILEINGPVVKVDNTGDLSMHEMVYVGKLGLIGEIIALRGKIAIVQVYEETSMLEPGEPVERTGKMLSVVLGPGLLGNIYDGIQRPLRTLLEKAGPFMKRGVRAFGLDTDKFWSVSVLKREGERVRGGDVIAEVQETNSIRHRIMVPPHIKEGTLVNVRQSGDYRVTDTIAVVKTEDGMEEIKLYQEWPVRVPRPVKRFLEPTVPLITGQRVIDIFFPISKGGTAAIPGGFGTGKTITQHQLAKWADTDVVVYIGCGERGNEMTEVLEEFPQLQDPRTGKPLMDRTILIANTSNMPVSAREASIYTGITIAEYFRDMGYNVALMADSTSRWAEALRELSGRLEEMPVEEGYPSYLATRIAQFYERAGLCENLNGTVGSVTIIGAVSPPGGDFSEPVTQHTKRFVRCFWALDRNLAYSRHYPSINWITSYSEYVETLEDWFKDNVDPEWPRYREDALRILIEDDRLQQIIKIMGEDVLPDDQKLTVLVARIIKTGILQQNAFSKVDSFCPLEKQFKILKLIVDTYYNARKMLEKAIPVGKILPPEIVSKLSTLKESDHFDEELAEIEKTLTDHFEELEKLYPNKAR

SEQ ID NO: 1187 - protein, 310 aa, Glycine max
MFTVLLLFSLLLTTSTSHNIISYPHFQQLNVKQILTETKLNPTNTYKHLQHQKLNIATEASSPAKYKLKLVHRDKVPTFNTSHDHRTRFNARMQRDTKRVAALRRHLAAGKPTYAEEAFGSDVVSGMEQGSGEYFVRIGVGSPPRNQYVVIDSGSDIIWVQCEPCTQCYHQSDPVFNPADSSSFSGVSCASTVCSHVDNAACHEGRCRYEVSYGDGSYTKGTLALETITFGRTLIRNVAIGCGHHNQGMFVGAAGLSGLGGGPMSFVGQLGGQTGGAFSYCLVSRGIESSGLLEFGREAMPVRAAWVPLI

SEQ ID NO: 1188 - protein, 301 aa, Porphyra purpurea
MTQLTNIVSNDTLVNLQEEYDKTQIQEVLNELNQELIGLVPVKTRIREIAALLLIDRLRRKLELVSGNPGLHMSFTGSPGTGKTTVAMKMADILHRLGYIKKGHLLTVTRDDLVGQYIGHTAPKTKEVLKQAMGGVLFIDEAYYLYKADNERDYGSEAIEILLQVMENQRNDLVVIFAGYKDRMEKFYESNPGLSSRVANHVDFPDYTSEELLQIAKMMIEEQQYCFTEEADKTLLEYTERRMKQPYFANARSIRNAIDRARMRQANRIFASGEKVLTKADLVTIEAEDILKSRLFSLPNN

SEQ ID NO: 1189 - protein, 589 aa, Lactobacillus delbrueckii subsp. bulgaricus
MKKTKIVSTLGPASDDIETITKLAEAGANVFRFNFSHGNHEEHLARMNMVREVEKKTGKLLGIALDTKGAEIRTTDQEGGKFTINTGDEIRVSMDATKAGNKDMIHVTYPGLFDDTHVGGTVLIDDGAVGLTIKAKDEEKRELVCEAQNTGVIGSKKGVNAPGVEIRLPGITEKDTDDIRFGLKHGINFIFASFVRKAQDVLDIRALCEEANASYVKIFPKIESQEGIDNIDEILQVSDGLMVARGDMGVEIPFINVPFVQKTLIKKCNALGKPVITATQMLDSMQENPRPTRAEVTDVANAVLDGTDATMLSGESANGLYPVQSVQAMHDIDVRTEKELDTRNTLALQRFEEYKGSNVTEAIGESVVRTAQELGVKTIIAATSSGYTARMISKYRPDATIVALTFDEKIQHSLGIVWGVEPVLAKKPSNTDEMFEEAARVAKEHGFVKDGDLVIIVAGVPFGQSGTTNLMKLQIIGNQLAQGLGVGTGSVIGKAVVANSAEEANAKVHEGDILVAKTTDKDYMPAIKKASGMIVEASGLTSHAAVVGVSLGIPVVVGVADATSKIADGSTLTVDARRGAIYQGEVSNL

SEQ ID NO: 1190 - protein, 427 aa, Pseudomonas syringae pv. tomato str. DC3000
MTDTRNGEDNGKLLYCSFCGKSQHEVRKLIAGPSVFICDECVDLCNDIIREEVQEAQAESSAHKLPSPKEISGILDQYVIGQERAKKVLAVAVYNHYKRLNQRDKKNDDVELGKSNILLIGPTGSGKTLLAETLARLLNVPFTIADATTLTEAGYVGEDVENIIQKLLQKCDYDVEKAQMGIVYIDEIDKISRKSDNPSITRDVSGEGVQQALLKLIEGTVASVPPQGGRKHPQQEFLQVDTRNILFICGGAFSGLEKVIQNRSTRGGIGFNAEVRSKEEGKKVGESLREVEPDDLVKFGLIPEFVGRLPVLATLDELDEAALIQILTEPKNALTKQYAKLFEMEGVDLEFRTDALKSVARRALERKTGARGLRSILEGVLLDTMYEIPSQSDVSKVVIDESVIDGTSKPLLIYENSEPPAKAAPDA

SEQ ID NO: 1191 - protein, 452 aa, Prochlorococcus marinus str. MIT 9313
MAKFDAHLKCSFCGKSQDQVRKLIAGPGVYICDECIDLCTEILDEELVDSQGNPRHSSESNRKSATASHKSGKPAPTLATIPKPQQIKSFLDKQVVGQEAAKKVLSVAVYNHYKRLAWQGDGQGETDLSATRLHKSNILLIGPTGCGKTLLAQTLAELLDVPFAVADATTLTEAGYVGEDVENILLRLLQKADMDVEHAQRGIIYVDEIDKIARKSENPSITRDVSGEGVQQALLKMLEGTVANVPPQGGRKHPYQDCIQIDTSQILFICGGAFIGLEDVVQKRLGRNAIGFMPSDGRGRSRANRDLQASQVLHHLEADDLVRYGLIPEFIGRIPVSAVLEPLDSQALESILTEPRDALVKQFSTLLSMDNVQLEFESDAVEAIAQEAHRRKTGARALRGIIEELMLDLMYDLPSKKNVKKFTVTRTMVDEHTGGKVLPLPANDERSHQESA

SEQ ID NO: 1192 - protein, 426 aa, Xylella fastidiosa 9a5c
MSEDRPSRSGDGNKILYCSFCGKSQREVRKLIAGPSVFICDECVELCNDIIREELEEKSQSARSSLPKPKEILEVLDQYVIGQQRAKRTLAVAVYNHYKRIESRHKNDDIELAKSNILLVGPTGSGKTLLAETLARLLNVPFTIADATTLTEAGYVGEDVENIIQKLLQKCDYDVERAQHGIVYIDEIDKISRKSENPSITRDVSGEGVQQALLKLIEGTVASVPPQGGRKHPQQEFLQVDTKNILFICGGAFAGLDKVIQQRCTEAGGIGFGVKVKSSESKRDVGKVLAGVEPEDLIKFGLIPEFVGRLPVVATLDELDESALVKILTEPKNAITKQFKKLFEMENVELEFRQDALSAVARKALKRKTGARGLRTIVELVLLDTMYELPSQEGISKVVVDESVIENKSEPYLIYQTMPAKVASGE

SEQ ID NO: 1193 - protein, 527 aa, Neurospora crassa
MAATALDHLSLGGKIQWLAQLNTEFQPAREFRRTSIICTIGPKTNSVEAINKLRDAGLNVVRMNFSHGSYEYHQSVIDNARQAEKVHPGRPIAIALDTKGPEIRTGNTKNDEDIPISAGTILNITTDEKYKDECTIEHMYVDYVNITKVIAPGRIIYVDDGVLAFEVLEIVDDKTIKVKARNNGYISSRKGVNLPNTDVDLPALSEKDKADLRFGVKNKVDMVFASFIRRGQDIKDIREVLGEDGKQIQIIAKIENRQGLNNFAEILAETDGVMVARGDLGIEIPAAEVFAAQKKIIAMCNIAGKPVICATQMLESMIKNPRPTRAEISDVGNAVTDGADCVMLSGETAKGAYPTEAVREMSEAVLKAENTIPYVSHFEELCSLAKRPVSIVESCAMASVRASLDLNAAAILVLSTSGESARLISKYRPVCPIIMITRNDSASRYAHLYRGVYPFLFPESKPDFSKVNWQEDVDRRIKWGLSHGIGLKVLNEGETVVVVQGWKGGMGNTNTFRIVKADVNHLGLGQP

SEQ ID NO: 1194 - protein, 420 aa, Staphylococcus aureus subsp. aureus MW2
MFKFNEDEENLKCSFCGKDQDQVKKLVAGSGVYICNECIELCSEIVEEELAQNTSEAMTELPTPKEIMDHLNEYVIGQEKAKKSLAVAVYNHYKRIQQLGPKEDDVELQKSNIALIGPTGSGKTLLAQTLAKTLNVPFAIADATSLTEAGYVGDDVENILLRLIQAADFDIDKAEKGIIYVDEIDKIARKSENTSITRDVSGEGVQQALLKILEGTTASVPPQGGRKHPNQEMIQIDTTNILFILGGAFDGIEEVIKRRLGEKVIGFSSNEADKYDEQALLAQIRPEDLQAYGLIPEFIGRVPIVANLETLDVTALKNILTQPKNALVKQYTKMLELDNVDLEFTEEALSAISEKAIERKTGARGLRSIIEESLIDIMFDVPSNENVTKVVITAQTINEETEPELYDAEGNLINNSKTSA

SEQ ID NO: 1195 - protein, 476 aa, Arabidopsis thaliana
MVQNHQTVLAVDMPQTGGSKYLDDDGKNKRTGSVWTASAHIITAVIGSGVLSLAWATAQLGWLAGPVVMLLFSVVTYFTSSLLAACYRSGDPISGKRNYTYMDAVRSNLGGVKVTLCGIVQYLNIFGVAIGYTIASAISMMAIKRSNCFHKSGGKDPCHMNSNPYMIAFGLVQILFSQIPDFDQLWWLSILAAVMSFTYSSAGLALGIAQVVVNGKVKGSLTGISIGAVTETQKIWRTFQALGDIAFAYSYSIILIEIQDTVKSPPSEEKTMKKATLVSVSVTTMFYMLCGCMGYAAFGDLSPGNLLTGFGFYNPYWLLDIANAAIVIHLIGAYQVYCQPLFAFIEKQASIQFPDSEFIAKDIKIPIPGFKPLRLNVFRLIWRTVFVIITTVISMLLPFFNDVVGLLGALGFWPLTVYFPVEMYIAQKKIPRWSTRWVCLQVFSLGCLVVSIAAAAGSIAGVLLDLKSYKPFRSEY

SEQ ID NO: 1196 - protein, 494 aa, Schumacheria sp. SH1999
  unsure (1)..(494): unsure at all Xaa locations
PTTSGPGVSTLEKKSLGRIAQIIGPVLDVAFPPGKMPNIYNALLVKGRDTAGQQINVTCEVQQLLGNNRVRAVAMSATDGLMRGMEVIDTEAPLSVPVGGATLGRIFNVLGEPIDNLGPVDTRTTSPIHRSAPAFIQLDTKLSIFETGIKVVDLLAPYRRGGKIGLFGGAGVGKTVLIMELINNIAKAHGGVSVFGGVGERTREGNDLYMEMKESGVINEQNIEESKVALVYGQMNEPPGARMRVGLTALTMAEYFRDVNEQDVLLFIDNIFRFVQAGSEVSALLGRMPSAVGYQPTLSTEMGSLQERITSTKKGSITSIQAVYVPADDLTDPAPXTTFXHLDATTVLSRGLAAKGIYPAVDPLDSTSTMLQPRIVGEEHYETAQKVKQTLQRYKELQDIIAILGLDELSEEDRLTVARARKIERFLSQPFLVAEVFTGSPGKYVGLAETIRGFQLILSGELDGLPEQAFYLVGNIDEATAKAMNLEMESNLKK

SEQ ID NO: 1197 - protein, 476 aa, Arabidopsis thaliana
MLDLQPSDRRHGAPSSSGGVSGGDELIRTYKGWKGNNVFFLGGRLVFGPDARSILITVFLITAPVIVFCIFVGRKFIDDFPHHRGVSVLAVAVGLILLDLVFLLLTSARDPGIIPRNLYPPEPESNEGNGEPRLAHTPQSRLPRTKDMIVNGITVKIKYCDTCMLYRPPRASHCSICNNCVEKFDHHCPWLGQCIGLRNYRFYFMFVLCSTLLCIYVHVFCWIYVKRIMDSENINIWKSFLKTPASIALIIYTFICVWFVGGLTCFHLYLMSTNQSTYENFRYRYDRHENPFNKGIVGNFMEVFCTNVAVSQNSFREKVSKEPAIPPRTVNGGMSSPSLQKVSNDIEMGRKPVWHETVEEELGDIEKDMEAGVASRDLSRMLPPEESEGRGIMHSRESSRGRGIMHSRESSRGRRGGSWELSSRVNEDLRTRDESVSRVGEDSSESSDNDASRDLHVEIYDAVTSRGRTGTGIGRL

SEQ ID NO: 1198 - protein, 248 aa, Rosa hybrid cultivar
MAYENKPNTVLDADAQRRLGRGKIEIKRIENTTNRQVTFCKRRNGLLKKAYELSVLCDAEVALIVFSNRGRLYEYSNNSVRETIERYKKACADSSNNGSVSEATTQYYQQEAAKLRAQITTLQNSNRGYMAEGLSNMSIKELKGVETKLEKAISRIRSKKNELLFAEIEYMQKRELDLHNNNQLLRAKIADNERHQQSINAIAGGHGSYEIMQPTQPFHEARNYFQVNALEPNIHQYSRHDQISLQLV

SEQ ID NO: 1199 - protein, 490 aa, Cladostigma hildebrandtioides
MRINPTTSGSEVSAVEKKNLGRIVQIIGPVLDVAFPPGKMPNIYNALVVQGRDNEQMNVACEVQQLLGNNRVRAVAMSDTDGLMRGMEVIDTGAPISVPVGGATLGRIFNVLGEPVDNLGPVDTKTTSPIHRSAPAFIQLDTKLSIFETGIKVVDLLAPYRRGGKIGLFGGAGVGKTVLIMELINNIAKAHGGVSVFGGVGERTREGNDLYMEMKESGVINEENIAESKVALVYGQMNEPPGARMRVGLTALTMAEYFRDVNEQDVLLFIDNIFRFVQAGSEVSALLGRMPSAVGYQPTLSTEMGSLQERITSTKEGSITSIQAVYVPADDLTDPAPATTFAHLDATTVLSRGLAAKGIYPAVDPLDSTSTMLQPRIVGEEHYETAQRVKQTLQRYKELQDIIAILGLDELSEEDRLTVARARKIERFLSQPFFVAEVFTGSPGKYVGLAETIRGFQLILSGELDGLPEQAFYLVGNIDEATAKAMNLKT

SEQ ID NO: 1200 - protein, 188 aa, Glycine max
SEAFRTLLMWLCRYKHVEDAEALFHNSVKKGLRADIKMWNVILNGWCVLGNSHEAKRVWRDIVASPCKPDIFTYATFIKALTKKGKLGTALKLFRGMWDKGGKPDVVICNCIIDALCFKKRIPEALEIFCDMSERGCEPNVATYNSLIKYMCKIQRMEKVYELVDEMERKKGSCLPNAVTYCYLLKSL

SEQ ID NO: 1201 - protein, 253 aa, Rumex acetosa
MEFSNELSRDMEDGSPQRKMGRGKIEIKRIENVTNRQVTFCKRRNGLLKKAYELSVLCDAEVALIVFSSRGRLYEYANHSVKATIERYKKTCSDSTGVTSVEEANAQQEAAKLRNQIRTLQNQTRNTSRNLMGEGLTSMNMKDLKNLETRLEKGISRVRAKKNELLFGEIEFMQKKEIELHNNNQFLRAKIAESERSQQSMNLMPGSSSGEQHYELMPQSQAGPFDSRNFFQVSDLQPDERYSCQNQTPLQLV

SEQ ID NO: 1202 - protein, 110 aa, Glycine max
KIQIVAKTAGMHRNEWVENADRWVAGFLEMFEEGCHKMGTAIRDRIQERLRGQQSRDGTLRLQNGEDDKDDDDEEYYYDDEEDSDEEYFEEYYDDDELNPQNNGKDEKKE

SEQ ID NO: 1203 - protein, 426 aa, Pseudomonas aeruginosa PAO1
MTDTRNGEDNGKLLYCSFCGKSQHEVRKLIAGPSVFICDECVDLCNDIIREEVQEAQAESSGHKLPAPKEIRTILDQYVIGQERAKKVLAVAVYNHYKRLNQRDKKDDIELGKSNILMIGPTGSGKTLLAETLARLLNVPFTIADATTLTEAGYVGEDVENIIQKLLQKCDYDVEKAQMGIVYIDEIDKISRKSDNPSITRDVSGEGVQQALLKLIEGTVASVPPQGGRKHPQQEFLQVDTRNILFICGGAFAGLERVIQNRSARGGIGFNAEVRSQEMGKKVGEAFKEVEPEDLVKFGLIPEFVGRLPVIATLDELDEAALMQILTEPKNALTKQYAKLFEMEGVDLEFRPDALKAVARKALERKTGARGLRSILEGILLDTMYEIPSQQDVSKVVIDESVIDGSSQPLMIYENSEKPAKAAPEA

SEQ ID NO: 1204 - protein, 206 aa, Triticum aestivum
AHASVIKEVGDGTFGSVWRAINKQNGEVVAVKKMKRKYYSFEECMSLREVKSLRRMNHPNIVKLKEVIRENDILYFIMEYMECNLYQLMKDRVKPFAESDVRNWCFQIFQALAYMHHRGYFHRDLKPENLLVSKDVLKLADFGLAREISSAPPYTEYVSTRWYRAPEVLLQSSAYDSAVDMWAMGAIMAELLTLHPLFPGTSEADE

SEQ ID NO: 1205 - protein, 490 aa, Alloxylon wickhamii
GPGVSALEEKSLGRIAQIIGPVLDVAFPPGKMPNIYNALVVKGRDTVGQQINVTCEVQQLLGNNRVRAVAMSATDGLMRGMEVIDTGAPLSVPVGGATLGRIFNVLGEPVDNLGPVDTRTTSPIHRSAPAFIQLDTKLSIFETGIKVVDLLAPYRRGGKIGLFGGAGVGKTVLIMELINNIAKAHGGVSVFGGVGERTREGNDLYMEMKESGVINEQNITESKVALVYGQMNEPPGARMRVGLTALTMAEYFRDVNEQDVLLFIDNIFRFVQAGSEVSALLGRMPSAVGYQPTLSTEMGSLQERITSTKEGSITSIQAVYVPADDLTDPAPATTFAHLDATTVLSRGLAAKGIYPAVDPLDSTSTMLQPRIVGEEHYETAQRVKQTLQRYKELQDIIAILGLDELSEEDRLTVARARKIERFLSQPFFVAEVFTGSPGKYVGLAETIRGFQLILSGELDSLPEQAFYLVGNIDEATAKAMNLEVESNLKK

SEQ ID NO: 1206 - protein, 506 aa, Saccharomyces bayanus
MPESRLQRLANLKIGTPQELRRTSIIGTIGPKTNSCEAITALRKAGLNIIRMNFSHGSYEFHQSVIDNALKSEQQFPGRPLAIALDTKGPEIRTGRTPNDQDFHILVDHQMIFTTDAKFEHSSNDKIMYIDYANLTKVIVPGKLIYVDDGILSFKVLQIMDDANIRVQALNSGYISSRKGVNLPNTDVDLPPLSAKDIQDLQFGMRNGIHMVFASFIRAPEDVLTIRKVLGTEGEDIKIISKIENQQGLDNFDEILQVTDGVMIARGDLGIEILAPEVLAIQKKLIAKCNVAGKPVICATQMLESMTYNPRPTRAEVSDVGNAVLDGADCVMLSGETAKGDYPVNAVKIMAATALIAESTIAHLALYDDLRDATSKPTSTTETVAAAATAAILEQNGKAIVVLSTTGNTARLLSKYRPSCPIILVTRHARTARIAHLYRGVFPFVFEPKRLYDWGEDVHRRLKFGVEMARSFGMVESGDTVVSIQGFRGGIGHSNTLRVSTVGEEF

SEQ ID NO: 1207 - protein, 221 aa, Microbulbifer degradans 2-40
MIKGIIFDHDGTLVKSEHEHYKIWRSIVQEYGHDLSEEVYIASYSGVPTVQNAELLINSFGLPLTVEALCERKKQDMAAFLATGSFETMPYAKEILARCQALGLKQAIASGAKRAEIDHSRAAHNYDAYCEAFVTYEDVAQSKPAPDAYILAARLLGLEINECIAVEDSFSGVTSAKAANMYCIAIPNAYSAKQDLSAADIQLPSLEAACEHIETLVTKSA

SEQ ID NO: 1208 - protein, 594 aa, Prochlorococcus marinus subsp. marinus str. CCMP1375
MTTIDLKRRTKIVATIGPATESPEKITELIKAGATTFRLNFSHGDHEEHAKRIKTIRSVASDLGVNIGILQDLQGPKIRLGRFKEGPVNLKTGDVFALTSENKDCNQEIANVTYENLVNEVEKGKRILLDDGRVEMIVENVDKKNKSLICKVTVGGILSNNKGVNFPDVQLSINALTEKDKIDLSFGLKQGVDWVALSFVRNPADIQEIKELIRRHGYTTPIVAKIEKFEAIDQIDSILSLCDGVMVARGDLGVEMDAEEVPLLQKELIKKANSLGIPIITATQMLDSMASSPRPTRAEVSDVANAILDGTDAVMLSNETAVGDYPIEAVETMAKIARRIERDYPQRALESHLPSTIPNAISAAVSTIARQLNAAAILPLTKSGATAHNVSKFRPATPILAITSEISVARRLQLVWGVSPLLIDAQKSTSKTFGIAMEQAMDMKLLKPGDQVVETAGTLTGISGSTDLIKVGIVSKIVASGKTKPIVKEGTISGKLRVINKATDLSDLKSGEILVLAENVQYNLDTKTHISAMIFEGEYSLINTNNQIEDNNIIPAIYNVEGACTKFKNGEIVTLDLKDGNIIKGLAQDLKTYN

SEQ ID NO: 1209 - protein, 1402 aa, Oryza sativa
  unsure (1)..(1402): unsure at all Xaa locations
XILDIVFGWKARRSMSFAVKLRYVLKLISSSAWVVILPVTYAYTWDSPTGLARIIKSWLGNGQNQPSLYILAVVIYLAPNMLAAMLDGIYVVTVVYMFCQMYLQPRLFVGRGMHEGAFSLFKYTMFWVLLLAMKLTVSFYIEIKPLVQPTKDIMKEPIRDFQWHEFFPRANNNIGVVIALWAPIILVYFMDTQIWYALFSTLIGGIYGAYRRLGEIRTLGMLRSRFESLPEAFNEHLIPSDSHKSKGLRAAFTGNFXTSGDEQEKEKIAARFAQMWNLIITSFREEDLIDNREMDLLLVPYCKDRELNIFQWPPFLLASKIPIALDMAADSGGKDRDLKKRMGSDPYFSYAIRECYGSFKNIINTLVFGQREKIVIQQIFTIVDEHIEGGSLIKDLNMRSLPALSKKFIELLELLVXKFVIMANKEEDLGQVVILFQDMLEVVTRDIMDEXRPARRVRIAWFCHNSIGNRKHEGMTSLDQQDQLFTKAIRFPVEESNAWTEKIKRLHLLLTVKESAMDVPTNLDARRRISFFANSLFMEMPNAPKVRHMLPFSVLTPYYKEDVLFSSHNLEEPNEDGVSILFYLQKIYPGSFLPYAILLMTIIINIVFPNLFEFXKDEWKNFLDRVDRKSEEELREDETLEEELRLWASYRGQTLTRTVRGMMSYRKALELQAFLDMAKDDDLMEGYRATELMSEDSQLMTQCKAIADMKFTYVVSCQQYGIQKRSGEACAHDILRLMTRYPSLRVAYIDEVEAPSQDRNKKTDKVYYSALVKXXSVTKPNEPGQSLDQVIYKIKLPGNAILGEGKPENQNHAIIFTRGECLQTIDMNQEHYMEEALKMRNLLDEFLKKHDGVRYPSILGVREHIFTGSVSSLAWFMSNQETSFVTIGQRVLANPLRVRFHYGHPDIFDRLFHLTRGGVSKASKIINLSEDIFAGFNSTLREGNVTHHEYMQVGKGRDVGLNQIALFEAKIANGNGEQTLSRDIYRLGHRFDFFRMLSCYYTTIGFYFSTMITVWTVYVFLYGRLYLVLSGLDQALATGKKFVHNAPLQVALASESFVQLGFLMALPMMMEIGLERGFRTALSDFVLMQLQLASVFFTFSLGTKTHYYGRTLLHGGAEYRATGRGFVVFHAKFADNYRLYSRSHFVKGIELMILLVVYEIFGQSYRGAITYIFITVSMWFMVGTWLFAPFLFNPSGFEWQKIVDDWTDWNKWISNRGGIGVAPTKSWESWWEKEQEPLRYSGKRGLLLFMGCDFRNFTCHEDCFSRXEEVQCGVPACLPVDQGPYIHNICRHCCDINCHPSHDSSXYLRLHPCFHANWMGLASAIKPAVQAIGLWGSIKALARGYEILMGLLLFTPIAFLAWFPFVSEFQTRMLFNQAFSRGLQISRILGGHKKDRSTRNKE

SEQ ID NO: 1210 - protein, 500 aa, Streptococcus agalactiae 2603V/R
MNKRVKIVATLGPAVEFRGGKKFGESGYWGESLDVEASAEKIAQLIKEGANVFRFNFSHGDHAEQGARMATVRKAEEIAGQKVGFLLDTKGPEIRTELFEDGADFHSYTTGTKLRVATKQGIKSTPEVIALNVAGGLDIFDDVEVGKQILVDDGKLGLTVFAKDKDTREFEVVVENDGLIGKQKGVNIPYTKIPFPALAERDNADIRFGLEQGLNFIAISFVRTAKDVNEVRAICEETGNGHVKLFAKIENQQGIDNIDEIIEAADGIMIARGDMGIEVPFEMVPVYQKMIITKVNAAGKAVITATNMLETMTDKPRATRSEVSDVFNAVIDGTDATMLSGESANGKYPVESVRTMATIDKNAQTLLNEYGRLDSSAFPRNNKTDVIASAVKDATHSMDIKLVVTITETGNTARAISKFRPDADILAVTFDEKVQRSLMINWGVIPVLADKPASTDDMFEVAERVALEAGFVESGDNIVIVAGVPVGTGGTNTMRVRTVK

SEQ ID NO: 1211 - protein, 242 aa, Petunia x hybrida
MEFQSDLTREISPQRKLGRGKIEIKRIENTTNRQVTFCKRRNGLLKKAYELSVLCDAEVALIVFSSRGRLYEYANNSVKATIERYKKACSDSSNTGSIAEANAQYYQQEASKLRAQIGNLQNQNRNFLGESLAALNLRDLRNLEQKIEKGISKIRAKKNELLFAEIEYMQKREIDLHNNNQYLRAKIAETERSQQMNLMPGSSSYDLVPPQQSFDARNYLQVNGLQTNNHYPRQDQPPLQLV

SEQ ID NO: 1212 - protein, 239 aa, Thermotoga maritima
MKGFIAYIPAGFPDLETTRKILIALNELGITGVEIGVPFSDPVADGPVIQLAHSVALRNGVTIKKILEMLSEISVDYDLYLMSYLNPIVNYPEGKEKLLDELKKLGVKGLIIPDLPLREVKNVDIAYPIVPFVAPNTKDEEIDLINSVQAPFVYYISRYGVTGEREDLPFADHIKRVKERIKLPLFVGLGISRHEQVKKVWEIADGVIVGSALVRIMEENPKDEIPRKVVEKVKELLGK

SEQ ID NO: 1213 - protein, 585 aa, Bacillus subtilis subsp. subtilis str. 168
MRKTKIVCTIGPASESIEMLTKLMESGMNVARLNFSHGDFEEHGARIKNIREASKKLGKNVGILLDTKGPEIRTHTMENGGIELETGKELIISMDEVVGTTDKISVTYEGLVHDVEQGSTILLDDGLIGLEVLDVDAAKREIKTKVLNNGTLKNKKGVNVPGVSVNLPGITEKDARDIVFGIEQGVDFIAPSFIRRSTDVLEIRELLEEHNAQDIQIIPKIENQEGVDNIDAILEVSDGLMVARGDLGVEIPAEEVPLVQKELIKKCNALGKPVITATQMLDSMQRNPRPTRAEASDVANAIFDGTDAIMLSGETAAGSYPVEAVQTMHNIASRSEEALNYKEILSKRRDQVGMTITDAIGQSVAHTAINLNAAAIVTPTESGHTARMIAKYRPQAPIVAVTVNDSISRKLALVSGVFAESGQNASSTDEMLEDAVQKSLNSGIVKHGDLIVITAGTVGESGTTNLMKVHTVGDIIAKGQGIGRKSAYGPVVVAQNAKEAEQKMTDGAVLVTKSTDRDMIASLEKASALITEEGGLTSHAAVVGLSLGIPVIVGLENATSILTDGQDITVDASRGAVYQGRASVL

SEQ ID NO: 1214 - protein, 273 aa, Methanothermobacter thermautotrophicus str. Delta H
MIVMSGAKSMSYAEMFRRADGCAFVPFVVAGDPDMETSLEIIRTLVDAGADALEVGFPFSDPIADGTSVQGADLRALRAGMTTEKCFQLIERVREFTSIPIGLLVYYNLIYRMGVDEFYRRAAEAGVTGILAADLPPEEASDALRAAEKYDIDQIFIVAPTTGSERLKRISEVSSGFHYLVSVMGVTGARSRVEDATIELIKRVKAEGSLPVMVGFGVSRPEHVRMLRDAGADGVIVGSAIIDVISGNLGDRELMLQRIHEMAGTLKAAGGSG

SEQ ID NO: 1215 - protein, 362 aa, Glycine max
  unsure (1)..(362): unsure at all Xaa locations
MADQSEHSKTASPPEDQDRPVRVYADGIYDLFHFGHARSLEQAKKSYSSIISQSFALPPRSDNRFHLYQSIYRLADQSEHSKTVQPPEDHDRPVRHTADGIYDLFHFGHARSLEXAKKSFPNTYLLVGCCNDEVTHKYKGKTVMTDAERYESLRHCKWVDEVIPDGAANDVYEFVKSVGRFKETKRTEGISTSDVIMRIVKDYNQYVLRNLDRGYSRNELGVSYVKEKRLRVNRRLKTLQEKVKEHQEKVGEKIQIVAKTAGMHRNEWVENADRWVAGFLEMFEEGCHKMGTAIRDRIQERLRGQQSRDGTLRLQNGKDDKDDDDEEYYYDEEDDSDEEYFEEYYDDDELNPQNNGKDEKKE

SEQ ID NO: 1216 - protein, 1022 aa, Saccharomyces cerevisiae
  unsure (1)..(1022): unsure at all Xaa locations
GAIYSVSGPVVIAENMIGCAMYELVKVGHDNLVGEVIRIDGDKATIQVYEETAGLTVGDPVLRTGKPLSVELGPGLMETIYDGIQRPLKAIKEESQSIYIPRGIDTPALDRTIKWQFTPGKFQVGDHISGGDIYGSVFENSLISSHKILLPPRSRGTITWIAPAGEYTLDEKILEVEFDGKKSDFTLYHTWPVRVPRPVTEKLSADYPLLTGQRVLDALFPCVQGGTTCIPGAFGCGKTVISQSLSKYSNSDAIIYVGCFAKGTNVLMADGSIECIENIEVGNKVMGKDGRPREVIKLPRGRETMYSVVQKSQHRAHXSDSSREVPELLKFTCNATHELVVRTPRSVRRLSRTIKGVEYFEVITFEMGQKKAPDGRIVELVKEVSKSYPISEGPERANELVESYRKASNKAYFEWTIEARDLSLLGSHVRKATYQTYAPILYENDHFFDYMQKSKFHLTIEGPKVLAYLLGLWIGDGLSDRATFSVDSRDTSLMERVTEYAEKLNLCAEYKDRKEPQVAKTVNLYSKVVRGNGIRNNLNTENPLWDAIVGLGFLKDGVKNIPSFLSTDNIGTRETFLAGLIDSDGYVTDEHGIKATIKTIHTSVRDGLVSLARSLGLVVSVNAEPAKVDVNGTKHKISYAIYMSGGDVLLNVLSKCAGSKKFRPAPAAAFARECRGFYFELQELKEDDYYGITLSDDSDHQFLLANQVVVHNCGERGNEMAEVLMEFPELYTEMSGTKEPIMKRTTLVANTSNMPVAAREASIYTGITLAEYFRDQGKNVSMIADSSSRWAEALREISGRLGEMPADQGFPAYLGAKLASFYERAGKAVALGSPDRTGSVSIVAAVSPAGGDFSDPVTTATLGITQVFWGLDKKLAQRKHFPSINTSVSYSKYTNVLNKFYDSNYPEFPVLRDRMKEILSNAEELEQVVQLVGKSALSDSDKITLDVATLIKEDFLQQNGYSTYDAFCPIWKTFDMMRAFISYHDEAQKAVANGANWSKLADSTGDVKHAVSSSKFFEPSRG

SEQ ID NO: 1217 - protein, 400 aa, Coleochaete nitellarum
LGDNKVRAVSMSATDGLMRGMDVIDTGAPLSVPVGEATLGRIFNVLGEPVDELGPVDSTITFPIHRSAPAFTQLDTKLSIFETGIKVVDLLAPYRRGGKIGLFGGAGVGKTVLIMELINNIAKAHGGVSVFGGVGERTREGNDLYMEMKESKVINEENISESKVALVYGQMNEPPGARMRVGLTALTMAEYFRDVNKQDVLLFIDNIFRFVQAGSEVSALLGRMPSAVGYQPTLSTEMGTLQERITSTKEGSITSIQAVYVPADDLTDPAPATTFAHLDATTVLSRGLAAKGIYPAVDPLDSTSTMLQPWIVGKEHYETAQGVKETLQRYKELQDIIAILGLDELSEEDRLIVARARKIERFLSQPFFVAEVFTGSPGKYVSLIETIKGFQLILSGDLDA

SEQ ID NO: 1218 - protein, 209 aa, Triticum aestivum
RNSARGLVKPIALFEGKVAGGNGEQVLSRDVYRLGQLFDFFRMLTFFYTTVGYYVCTMVSLPPPFIFWFRWGCRALAPRDHSLPPHARCRGHAALVAALVAPCAVLCGVPSAVPMSWGGFGGFALSWARPCLLTMQLQFCSVFFTFSLGTRTHYFGRTILHGGAKYRATGRGFVVRHIKFADNYRLYSRSHFVKALEVALLLIVYIAYG

SEQ ID NO: 1219 - protein, 291 aa, Triticum aestivum
  unsure (1)..(291): unsure at all Xaa locations
LATERLGFAANFKISFYPGKFSKERRSIIPAGDTSEFIPSREADIAILEEPEHLNWYHHGKRWTDKFNHVIGVVHTNYLEYIKREKNGALQAFLVKHINNWVTRAYCHKVLRLSAATQDLPRSIICNVHGVNPKFLNIGEKVIADRERGHNSFSKGAYFLGKMVWAKGYKELIDLLYKHKNDLEGFKLDVYGNGEDSQAVQAAARKLDLGINFYKGKDHADDSLHGYKVFINPSVSDVLCTATAEALAMGKFVICPDHPSNEFFKSFPNCLMYKTPXXFVARVXXXMSSEP

SEQ ID NO: 1220 - protein, 376 aa, Nepenthes alata
AVIGSGVLSLAWATAQLGWIAGPTAMLLFSFITFYTSRLLADCCRSGDSFTGERNPTYMDAVRSNLGGIQVKICGLVQYANLFGVSIGYTIAASISMMAIKRSNCFHASDDKNPCQYPASPFMIIFGLTEIIFAQIPDFHRLWWLSIVAAVMSFTYSTVGVSLGIAQVAENGKIKRSLTGISIGTVSQAQRIWRRFQALGDIAFAYSYSLVLVEIQDTIKSPPSEIKTMKKATVMSIAVTTLIYLLCGCMGYAAFGDLAPGNLLTGFGFYNPYWLLDLANAAIVVHLLGAYQVCCQPIFAFIETTASNAFPDNEFITKEVEIPIPGFKPYKLNLFRLVWRTSFVGVTTTISILLPFSNGVVGLLGALAFWPLTVYY

SEQ ID NO: 1221 - protein, 499 aa, Arabidopsis thaliana
MATNYNEKLLLNYVPVYVMLPLGVVNVENVFADPETLETQLKRLKEEAGVDGVMVDVWWGIIESKGPKQYDWTAYKTLFQLIARLGLKIQAIMSFHQCGGNVGDIVTIPIPQWVRDVGDNDPDIYYTNRKGTRDIEYLSIGVDNLPLFAGRTAVQVLYSDYMSSFKENMADLIEAGVIVDIEVGLGPAGELRYPSYPQSQGWVFPGIGEFQCYDKYLKKDFKEAAAKAGHPEWDLPEDAGEYNDKPEETGFFKKDGTYVSEKGKFFMTWYSNKLIFHGDQILGEANKIFAGLKVNLAAKVSGIHWLYNHHSHAAELTAGYYNLFKRDGYRPIARMLSKHYGILNFTCLEMKDTDNTAEALSAPQELVQEVLSKAWKEGIEVAGENALETYGAKGYNQILLNARPNGVNPNGKPKLRMYGFTYLRLSDTVFQENNFELFKKLVRKMHADQDYCGDAAKYGHEIVPLKTSNSQLTLEDIADAAQPSGAFKWDSETDLKVDG

SEQ ID NO: 1222 - protein, 252 aa, Glycine max
  unsure (1)..(252): unsure at all Xaa locations
MFPHKVASMAFPNPSMSVSPQKKMGRGKIEIKRIENTTXNRQVTFCKRRNGLLKKAYELSVLCDAEVALIVFSSRGRLYEYANNSVKATIERYKKACSDSSGAGSASEANAQFYQQEADKLRAQISSLQNNNRQMMGESLGPLTAKELKNLETKLEKGISRIRSKKNELLFAEIEYMQKREIDLHNNNQLLRAKIAEGERNHHNLAVLPGGSNYDSLQTSQQQFDSRGSFQVTGLQPNNQYARQDQMSLQLV

SEQ ID NO: 1223 - protein, 456 aa, Amaranthus hypochondriacus
  unsure (1)..(456): unsure at all Xaa locations
QIXGPVLDVAFPPGXMPNIYNALVVXGRDSVXQPINVTCEVQQLLGNNRVRAVAMSATDGLTRGMEVIDTGAPLSVPVGGTTLGRIFNVLGEPVDNLGPVDTSTTSPIHRSAPAFTQLDTKLSIFETGIKVVDLLAPYRRGGKIGLFGGAGVGKTVLIMELINNIAKAHGGVSVFGGVGERTREGNDLYMEMKESGVINEQNIAESKVALVYGQMNEPPGARMRVGXTALTMAEYFRDVNEQDVLLFIDNIFRFVQAGSEVSALLGRMPSAVGYQPTLSTEMGSLQERITSTKEGSITSIQAVYVPADDLTDPAPATTFAHLDATTVLSRGLAAKGIYPAVDPLDSTSTMLQPRIVGEEHYETAQRVKQTLQRYKELQDIIAILGLDELSEEDRLTVARARKIERFLSQPFFVAEVFTGSPGKYVGLAETIRGFQLXLSGELDGLPEQAFYLVGNI

SEQ ID NO: 1224 - protein, 483 aa, Androsace sp. Anderberg s.n.
  unsure (1)..(483): unsure at all Xaa locations
MRINPTTPGPGASVLEKKNLGRIIQIIGPVLDVSFPPGNMPNIYNALVVKGRDTAGQPINVTCEVQQLLGNNRVRAVAMSATDGLTRGMEVIDTGTALRVPVGGATLGRIFNVLGEPVDNLGPVDTXTTSPIHRSAPAFIQLDTKLSIFETGIKVVDLLAPYRRGGKIGLFGGAGVGKTVLIMELINNIAKAHGGVSVFGGVGERTREGNDLYMEMKESGVINEENIAESKVALVYGQMNEPPGARMRVGLTALTMAEYFRDVNEQDVLLFIDNIFRFGQAGSEVSALLGRMPSAVGYQPTLSTEMGSLQERITSTKEGSITSIQAVYVPADDLTDPAPATTFAHLDATTVLSRGLAAKGIYPAVDPLDSTSTMLQPRIVGEEHYETAQRVKETLQRYKELQDIIAILGLDELSEEDRLTVARARKIERFLSQPFFVAEVFTGSPGKYVGLAETIRGFQLILSGXLDGLPEQAFYLVGNIDEA

SEQ ID NO: 1225 - protein, 171 aa, Sporobolus stapfianus
MASASKEEVIGKLNVRVVRGSNLAICDPLTHTSDPYVVLHYGAQKVKTSVQKKNPNPVWNEVLQLSVTNPTKPVHLEVFDEDKFTADDSMGVAEINLTDIYDAAKLDLKHAADGTRIKTIYPVGVNYLGGESHVMWKDGKVVQDLILKLTKTDSGLITLQLEWVHVPGVKL

SEQ ID NO: 1226 - protein, 647 aa, Brassica napus
MSSAPSPGTGSPPSPPSNSTTTTPPPASAPPPTTPSSPPPPSTIPTSPPPSSRSTPSAPPPSPPTPSTPGSPPPLPQPSPPAPTTPGSPPAPVTPPTRNPPPSVPGPPSNPSREGGSPRPPSSPSPPSPSSDGLSTGVVVGIAIGGVALLVIVTLICLLCKKKRRRDEEDAYYVPPPPPPGPKAGGPYGGQQQQWRQQNATPPSDHVVTSLPPPPKAPSPPRQPPPPPPPPFMSSSGGSDYSDRPVLPPPSPGLVLGFSKSTFTYEELARATNGFSEANLLGQGGFGYVHKGVLPSGKEVAVKQLKVGSGQGEREFQAEVEIISRVHHRHLVSLVGYCIAGAKRLLVYEFVPNNNLELHLHGEGRPTMEWSTRLKIALGSAKGLSYLHEDCNPKIIHRDIKASNILIDFKFEAKVADFGLAKIASDTNTHVSTRVMGTFGYLAPEYAASGKLTEKSDVFSFGVVLLELITGRRPVDANNVYVDDSLVDWARPLLNRASEQGDFEGLADAKMNNGYDREEMARMVACAAACVRHSARRRPRMSQIVRALEGNVSLSDLNEGMRPGQSNVYSSYGGSTDYDSSQYNEDMKKFRKMALGTQEYNATGEYSNPTSDYGLYPSGSSSEGQTTREMEMGKIKRTGQGYSGPSL

SEQ ID NO: 1227 - protein, 312 aa, Arabidopsis thaliana
MAIAFKSGVFFLQSPKSQIGFRHSSPPDSSLSFKRFTPMASLSTSSPTLGLADTFTQLKKQGKVAFIPYITAGDPDLSTTAEALKVLDACGSDIIELGVPYSDPLADGPVIQAAATRSLERGTNLDSILEMLDKVVPQISCPISLFTYYNPILKRGLGKFMSSIRAVGVQGLVVPDVPLEETEMLRKEALNNDIELVLLTTPTTPTERMKLIVDASEGFIYLVSSIGVTGARSSVSGKVQSLLKDIKEATDKPVAVGFGISKPEHVKQIAGWGADGVIVGSAMVKLLGDAKSPTEGLKELEKLTKSLKSALL

SEQ ID NO: 1228 - protein, 844 aa, Oryza sativa
  unsure (1)..(844): unsure at all Xaa locations
AMARGGGGGCCPPMDLMRSEAMQLVQVIIPTESAHLTVSYLGELGLLQLKDLNADKSPFQRTYAAQIKRCGEMARKLRFFKEQMSKAGISTSAQLTEISLDFDDLEIKLGELEAELAXVNANNEKLKRTYNELLEYSTVLQKAGEFFYSAQRSAAAQQREMEANQSGESSLESPLLEQDTLTDASKQVKLGSLSGLVPKEKAMAFERILFRATRGNIFLRQESVDEPVTDPVSGEKVAKNAFVIFYSGDRAKAKILKICDAFNANRYPFPEDVARQLHAVQEVSAKISELKATIDMGLAHRDNILKNIASEFENWNLQANKEKIIYHTLNMLSVDVTKKCLVGEGWSPVFATTQIQDALQRATLDSKSQVGSIFQVLNTTESPPTYFQTNKFTSAFQEIVDAYGIAKYQEANPGVFTIVTFPFLFAVMFGDWGHGICILVSTLYLIIREKKFASQETGDIMEMMFGGRYVIIMMALFSIYTGLIYNEFFSVPFELFGKSAYACRDPSCGDAATEGLLKVRRTYPFGVDPVWHGSRSELPFLNSLKMKMSILLGVAQMNLGIVISYFNAKFFRNSNALLCNTLLXDEIMTSSIAAVCFCNRYQFIPQLIFLNSLFGYLSMLIIIKWSTGAKADLYHTMIYMFLSPTDELGENQLFPGQKTVQLVLLLLALVSVPWMLIPKPFFLKMEHERRHQGQQYAMLQSTDDSVVAEMGHHNGSNHHEEFEFSEVFVHQLIHTIEFVLGAVSNTASYLRLWALSLAHSELSSVFYDKVLLLAFGYNNILIRIAGITIFXICATVGVLLVMETLSAFRPGLRLHWVAFQNKFYEGDGYKFAPFSFALISEEED

SEQ ID NO: 1229 - protein, 585 aa, Bacillus cereus ATCC 14579
MRKTKIVCTIGPASESIEKLEQLIEAGMNVARLNFSHGSHEEHGARIKNIREASKKTGKTVGILLDTKGPEIRTHDFVDGQAELVTGAEVVLSTEQVLGTAEKFSVSYAGLYDDVDPGSRILIDDGLIELEVIEKADGNIRTKVLNSGTVKNKKGVNVPNVSIKLPGITEKDVKDIIFGIEQKVDFIAASFVRKASDVLEIRELLEEHNAQYIQIVPKIENQEGIDNIDSILEVSDGLMVARGDMGVEIPPEEVPLVQKRLIKKCNVLGKPVITATQMLDSMQRNPRPTRAEASDVANAIFDGTDAIMLSGETAAGQYPVEAVTMMANIAVRVEKSLQYEDMFKKRIKEFTPTITDAISQSVAHTALALDVAAIVAPTESGYTAKMISKYRPKSPIVAVTSDEQVGRRLALVWGVQAFMAEKRAASTDEMLDTAIQTGMDAGLIGLGDTVVITAGVPVAETGTTNLMKIHVVGEEIAKGQGIGRKAAKGKVVVAKTAAEAVANVNEGDILVTTSTDKDMIPAIEKAAALVVEEGGLTSHAAVVGVSIGIPVIVGVNGVTATLKNGQEVTVDAARGIVYNGHAEVL

SEQ ID NO: 1230 - protein, 426 aa, Mycobacterium leprae
MARIGDSGDLLKCSFCGKSQTQVKKLIAGPGVYICDECIDLCNEIIEEELADADDVQLDELPKPVEIREFLEGYVIGQDTAKRTLAVAVYNHYKRIQAGEKGRDSKREPVELAKSNILMLGPTGCGKTYLAQTLAKMLNVPFAIADATALTEAGYVGEDVENILLKLIQAADYDVKRAETGIIYIDEVDKIARKSENPSITRDVSGEGVQQALLKILEGTQASVPPQGGRKHPHQEFIQIDTTNVLFIVAGAFAGLDKIIYERIGKRGLGFGAEVRSKAEIDTTDHFADVMPEDLIKFGLIPEFIGRLPVIASVINLDMESLVKILSEPKNALVKQYTWLFEMDGVELEFTNDALEAVADQAIHRGTGARGLRAIMEEVLLPVMYDIPSRDDVAKVVVTKETVQDNVLPTIVPRKPSRTERRDKSA

SEQ ID NO: 1231 - protein, 402 aa, Zygnema peliosporum
LLGDNKVRAVAMSATDGLMRGMEIIDTGAALSVPVGEVTLGRIFNVLGEPVDELGPVNANTKFEIHRPAPAFTQLDTKLSIFETGIKVVDLLAPYRRGGKIGLFGGAGVGKTVLIMELINNIAKAHGGVSVFGGVGERTREGNDLYMEMKESKVINEENISESKVALVYGQMNEPPGARMRVGLTALTMAEYFRDVNKQDVLLFIDNIFRFVQAGSEVSALLGRMPSAVGYQPTLSTEMGTLQERITSTKEGSITSIQAVYVPADDLTDPAPATTFAHLDATTVLSRNLAAKGIYPAVDPLDSTSTMLQPWIVGVEHYDIAQGVKQTLQRYKELQDIIAILGLDELSEEDRLVVARARKVERFLSQPFFVAEVFTGSPGKYVSLAQTITGFKMILSGELDHL

SEQ ID NO: 1232 - protein, 456 aa, Schinus molle
IGPVLDVAFPPGKMPNIYNALVVKGRDTVGQTINVTCEVQQLLGNNRVRAVAMSATDGLTRGMEVIDTGAPLSVPVGGATLGRIFNVLGEPVDNLGPVDTRTTSPIHKSAPAFIQLDTKLSIFETGIKVVDLLAPYRRGGKIGLFGGAGVGKTVLIMELINNIAKAHGGVSVFGGVGERTREGNDLYMEMKESGVINEQNISESKVALVYGQMNEPPGARMRVGLTALTMAEYFRDVNEQDVLLFIDNIFRFVQAGSEVSALLGRMPSAVGYQPTLSTEMGSLQERITSTKEGSITSIQAVYVPADDLTDPAPATTFAHLDATTVLSRGLASKGIYPAVDPLDSTSTMLQPRIVGEEHYETAQRVKQTLQRYKELQDIIAILGLDELSEEDRLTVARARKIERFLSQPFFVAEVFTGSPGKYVGLAETIRGFKLILSGELDGLPEQAFYLVGNIDE

SEQ ID NO: 1233 - protein, 269 aa, Pseudomonas syringae pv. syringae
MSRLQTRFDQLKEQNRAALVTFVTAGDPGYDTSLAILKGLPAAGADVIELGMPFTDPMADGPAIQLANIRALEAKQNLLKTLQMVREFRKGNNDTPLVLMGYFNPIHKYGVPKFIADAKEAGVDGLIVVDMPPEHNGELCDPAQAAGIDFIRLTTPTTDDVRLPTVLNGSSGFVYYVSVAGVTGAGAATLEHVEEAVARLRRHTDLPISIGFGIRTPEQAAAIARLADGVVVGSALIDHIANAKNDQQAIDGVLGLCAALSEGVRNASV

SEQ ID NO: 1234 - protein, 168 aa, Triticum aestivum
SAHASVIKEVGDGTFGSVWRAINKQNGEVVAVKKMKRKYYSFEECMSLREVKSLRRMNHPNIVKLKEVIRENDILYFIMEYMECNLYQLMKDRVKPFAESDVRNWCFQIFQAPAYMPQRGYFHRDLKPENLLVSKDVPKLADFGLAGEVSSAPPFTEYGLTRLYPTPE

SEQ ID NO: 1235 - protein, 494 aa, Didymeles perrieri
PTTSSPEVSTLQEKNLGRITQIIGPVLDVAFPPGKMPNIYNALVVKGRDTLGEQINVTCEVQQLLGNNRVRAVAMSATDGLMRGMEVIDTGAPLSVPVGGATLGRIFNVLGEPVDNLGPVDIRTTSPIHRSAPAFIQLDTKLSIFETGIKVVDLLAPYRRGGKIGLFGGAGVGKTVLIMELINNIAKAHGGVSVFGGVGERTREGNDLYMEMKESGVINEQNIAESKVALVYGQMNEPPGARMRVGLTALTMAEYFRDVNEQDVLLFIDNIFRFVQAGSEVSALLGRMPSAVGYQPTLSTEMGSLQERITSTKEGSITSIQAVYVPADDLTDPAPATTFAHLDATTVLSRGLAAKGIYPAVDPLDSTSTMLQPRIVGEEHYETAQRVKQTLQRYKELQDIIAILGLDELSEEDRLTVARARKIERFLSQPFFVAEVFTGSPGKYVGLAETIRGFQLILSGELDGLPEQAFYLVGNIDEATAKAMNSEVESKLRK

SEQ ID NO: 1236 - protein, 591 aa, Oryza sativa (japonica cultivar-group); identical to SEQ ID NO: 270

SEQ ID NO: 1237 - protein, 729 aa, Oryza sativa (japonica cultivar-group)
MVGIDLNTVEEEEDEEEGGATGTVTAPAEARAGGAVCLELWHACAGPVAPLPRKGSAVVYLPQGHLEHLGAAPGSGPGAAVPPHVFCRVVDVSLHADAATDEVYAQVSLVADNEEVERRMREGEDGAACDGEGEDAVKRPARIPHMFCKTLTASDTSTHGGFSVPRRAAEDCFPPLDYSLQRPFQELVAKDLHGTEWRFRHIYRGQPRRHLLTTGWSGFINKKKLVSGDAVLFLRGEDGELRLGVRRAAQLKNASPFPALHNQISNTSSLSEVAHAVAVKSIFHIYYNPRLSQSEFIIPYWKFMRSFSQPFSVGMRFKLRYESEDASERRRTGIIIGSREADPMWHGSKWKCLVVKWDDDVECRRPNGVSPWEIELSGSVSGSHLSTPHSKRLKSCFPQVNPDIVLPNGSVSSDFAESARFHKVLQGQELLGLKTRDGTVNTASQATEARNFQYTDERSCSINMSNNILGVPRLGVKTPSGNPGFSYHCSGFGESQRFQEVLQGQEVFRPYRGGTLSDACIRGSGFRQPDGNHAPGAAFKWLAPQGCDHHGITTSVLPQASSPSSVLMFPQTSSKMPGLEYIYGCLDRNENSRHFKIGPTQDMTRTDQTLRLWPHLISGKVLDECTRNEKLHSPVSGAEHESNNKCLNTNGCKIFGISLTEKAQAGDEVDCGNASYHSRLQSLKPQMPKSLGSSCATHFHRLCYRIQDDDRGNADDTRRMLVKFVVMHF

SEQ ID NO: 1238 - protein, 489 aa, Alangium sp. Chase 2541
  unsure (1)..(489): unsure at all Xaa locations
INPNXXXSEISAXEKKNLGRIAQIIGPVXDVAFPPGKMPNIYNALVVKGRDTAGQPINVXCEVQQLLGNNRVRAVAMSATDGLMRGMEVIDTGAPLSVPVGGATLGRIFNVLGEPVDNLGPVDTRTTSPIHRSAPAFIQLDTKLSIFETGIKVVDLLAPYRRGGKIGLFGGAGVGKTVLIMELINNIAKAHGGVSVFGGVGERTREGNDLYMEMKESGVINEQNIAESKVALVYGQMNEPPGARMRVGLTALTMAEYFRDVNEQDVLLFIDNIFRFVQAGSEVSALLGRMPSAVGYQPTLSTEMGSLQERITSTKEGSITSIQAVYVPADDLTDPAPATTFAHLDATTVLSRGLAAKGIYPAVDPLDSTSTMLQPRIVGEEHYETAQRVKQTLQRYKELQDIIAILGLDELSEEDRLTVARARKIERFLSQPFFVAEVFTGSPGKYVGLAETIRGFQLILSGELDGLPEQAFYLVGNIDEATAKXMNLE

SEQ ID NO: 1239 - protein, 479 aa, Glycine max
MMENGGKQTFEVSNDTLQRVGSKSFDDDGRLKRTGTIWTASAHIITAVIGSGVLSLAWAIAQLGWIAGPVVMILFSIVTYYTSTLLATCYRSGDQLSGKRNYTYTQAVRSYLGGFSVKFCGWVQYANLFGVAIGYTIAASISMMAIKRSNCYHSSGGKNPCKMNSNWYMISYGVSEIIFSQIPDFHELWWLSIVAAVMSFTYSFIGLGLGIGKVIGNGRIKGSLTGVTIGTVTESQKIWRTFQALGNIAFAYSYSMILIEIQDTIKSPPAESETMSKATLISVLVTTVFYMLCGCFGYASFGDASPGNLLTGFGFYNPFWLIDIANAGIVIHLVGAYQVYCQPLFSFVESNAAERFPNSDFMSREFEVPIPGCKPYKLNLFRLVWRTLFVILSTVIAMLLPFFNDIVGLIGAIGFWPLTVYLPVEMYITQTKIPKWGIKWIGLQMLSVACFVITILAAAGSIAGVIDDLKVYKPFVTSY

SEQ ID NO: 1240 - protein, 592 aa, Methanopyrus kandleri AV19
MSNSVKGEIVKIAGPVVEAVGCEGAKMYEVFRVGDEGLIGEVINIESDRATIQVYEETTGLQPGEPVKGTGELLSVELGPGLLTQIFDGIQRPLPEIRKEVGDFVERGILVSALDRKKKWEFTPKVKEGEKVEEGDVLGTVPETEFIEHKIMVPPGVSGEVIEIAADGEYTVEDTIAVIEDEEGEEHEVTMMQEWPVRKPRPYKRKLDPEEPLITGQRVIDTFFPVAKGGTAAIPGPFGSGKTVTQQQLAKWADAQVVVYIGCGERGNEMTEVLEDFPELEDPRTGRPLMERTILVANTSNMPVAAREACIYTGITMAEYYRDMGYDVALMADSTSRWAEALREISGRLEEMPGEEGYPAYLASRLAEFYERAGRVVCLGSDDRVGSVTVVGAVSPPGGDFSEPVTQNTLRIVKVFWALDSKLADRRHFPAINWLQSYSLYLDDVEKWWHEEIGGDWRELRDEAMEILQRESELEEIVQLVGPDALPESERLILEVARMIREDFLQQNAFHEVDTYCPPEKQYEMLKTILHFKERAEEAVDKGVPVDEILKLDVIDDIARMKVIPNEEAKEKIQEIRKKIDEQFEELIEEAS

SEQ ID NO: 1241 - protein, 473 aa, Equisetum arvense
AFENKLMKNYRFLGISTSSEGYITQIIGPVLDVAFPVGKMPNIFNSFIVKGQNPAGQSINVTCEVQQLLGNNKVRAVAMSATDGLMRGMEVIDTGAPLSVPVGEVTLGRIFNVLGEPVDNMGPVEATAKSPIHKPAPAFMDLETTVSIFETGIKVVDLLAPYRRGGKIGLFGGAGVGKTVLIMELINNIAKAHGGVSVFGGVGERTREGNDLYMEMKESKVINEENISESKVALVYGQMNEPPGARMRVGLTALTMAEYFRDVNKQDVLLFIDNIFRFVQAGSEVSALLGRMPSAVGYQPTLATEMGCLQERITSTKEGSITSIQAVYVPADDLTDPAPATTFAHLDATTVLSRGLAAKGIYPAVDPLDSTSTVLQPWIVGEEHYEVAQGVKQTLQRYKELQDIIAILGLDELSEQDRLLVARARKIERFLSQPFFVAEVFTGSPGKYVSLNETIRGFQNDFTGELDSLPEQA

SEQ ID NO: 1242 - protein, 487 aa, Glycosmis pentaphylla
  unsure (1)..(487): unsure at all Xaa locations
INPTTSGSGVSALANKNLGHIAQIIGPVLDVAFPPGKMPNIYNALVVKGRDTVDQPINVACEVQQLLGNNRVRAVAMSATDGLTRGMEVIDTGAPLSVPVGGATLGRIFNVLGEPVDNLGPVDTRTTSPIHKSAPAFIQLDTRLSIFETGIKVVDLLAPYRRGGKIGLFGGAGVGKTVLIMELINNIAKAHGGVSVFGGVGERTREGNDLYMEMKESGVINDQNIAESKVALVYGQMNEPPGARMRVGLTALTMAEYFRDVNEQDVLLFIDNIFRFVQAGSEVSALLGRMPSAVGYQPTLSTEMGSLQERITSTKEGSITSIQAVYVPADDLTDPAPAXTFAHLDATTVLSRGLAAKGIYPAVDPLDSTSTMLQPRIVGEEHYETAQRVKQTLQRYKELQDIIAILGLDELSEEDRLTVARARKIERFLSQPFFVAEVFTGSPGKYVGLAETIRGFKLILSGELDGLPEQAFYLVGNXDEATAKAIN

SEQ ID NO: 1243 - protein, 480 aa, Capsicum annuum
MIPIMSSAPLSTATPISLPVRKIPGSYGFPLLGPLWDRLDYNWFQKLPDFFSKRVEKYNSTVFRTNVPPCFPFFLGVNPNVVAVLDVKSFAHLFDMEIVEKANVLVGDFMPSVVYTGDMRVCAYLDTSEPKHTQIKNFSLDILKRSSKTWVPTLVKELDTLFGTFESDLSKSKSASLLPALQKFLFNFFSLTFLGADPSASPEIANSGFAYLDAWLAIQLAPTVSIGVLQPLEEIFVHSFSYPYFLVRGGYEKLIKFVKSEAKEVLTRAQTDFQLTEQEAIHNLLFILGFNAFGGFTIFLPTLLGNLGDEKNAEMQEKLRKEVREKVGTNQENLSFESVKEMELVQSFVYESLRLSPPVPSQYARARKDFMLSSHDSVYEIKKGELLCGYQPLVMKDPKVFDEPEKFMLERFTKEKGKELLNYLFWSNGPQTGRPTESNKQCAAKDAVTLTASLIVAYIFQKYDSVSFSSGSLTSVKKAC

SEQ ID NO: 1244 - protein, 291 aa, Yersinia pestis KIM
MERYQQLFKQLAAKKEGAFVPFVQLGDPSPAMSLNIIDTLIAAGADALELGIPFSDPLADGPTIQNAALRAFAAGVTPGICFEILAEIRQKHPTIPIGLLMYANLVFHNGIDHFYQRCAEVGVDSVLIADVPFEESAPFRAAALRHGIAPIFICPPNADDDLLREIASHGRGYTYLLSRAGVTGAENHGQLPLNHLVDKLREYNAAPALQGFGISEPAQVKASLAAGAAGAISGSAIVKIIEKNVAQPVEMLVHANPLRHRDESGNPQLVIIYNWLLLRVSYRLELITIYR

SEQ ID NO: 1245 - protein, 591 aa, Clostridium perfringens str. 13
MKTGKIIKVSGPLVVAEGMDEANVYDVVKVGEKGLIGEIIEMRGDKASIQVYEETSGIGPGDPVITTGEPLSVELGPGLIESMFDGIQRPLDAFMKAANSAFLSKGVEVKSLNREKKWPFVPTAKVGDKVSAGDVIGTVQETAVVLHRIMVPFGVEGTIKEIKAGDFNVEEVIAVVETEKGDKNLTLMQKWPVRKGRPYARKLNPVEPMTTGQRVIDTFFPVAKGGAAAVPGPFGAGKTVVQHQVAKWGDTEIVVYVGCGERGNEMTDVLNEFPELKDPKTGESLMKRTVLIANTSNMPVAAREASIYTGITIAEYFRDMGYSVSIMADSTSRWAEALREMSGRLEEMPGDEGYPAYLGSRLADYYERAGKVVALGKDGREGAVTAIGAVSPPGGDISEPVTQSTLRIVKVFWGLDAQLAYKRHFPSINWLTSYSLYLEKMGEWMDAHVADDWSALRTEAMALLQEEANLEEIVRLVGMDALSEGDRLKLEVAKSIREDYLQQNAFHENDTYTSLNKQYKMLNLILSFKHEAEKALEAGVYLDKVLKLPVRDRIARSKYISEEEISKMDDILVELKSEMNKLISEGGVLNA

SEQ ID NO: 1246 - protein, 77 aa, Mesembryanthemum crystallinum
RVLDALFPSVLGGTCAIPGAFGCGKTVISQALSKYSNSDAVVYVGCGERGNEMAEVLMDFPQLTMTLPDGREESVMK

SEQ ID NO: 1247 - protein, 488 aa, Symplocos costata
SGVSVLEKKNLGRFVQIIGPVLDVAFPPGKMPNIYNALVVKGRDTVGQPINVTCEVQQLLGNNRVRAVAMSATDGLTRGMEVIDTGAPLSVPVGGATLGRIFNVLGEPIDNLGPVDTRTTSPIHRSAPAFIQLDTKLSIFETGIKVVDLLAPYRRGGKIGLFGGAGVGKTVLIMELINNIAKAHGGVSVFGGVGERTREGNDLYMEMKESGVINEQNIAESKVALVYGQMNEPPGARMRVGLTALTMAEYFRDVNEQDVLLFIDNIFRFVQAGSEVSALLGRMPSAVGYQPTLSTEMGSLQERITSTKEGSITSIQAVYVPADDLTDPAPATTFAHLDATTVLSRGLAAKGIYPAVDPLDSTSTMLQPRIVGEEHYETAQRVKQTLQRYKELQDIIAILGLDELSEEDRLTVARARKIERFLSQPFFVAEVFTGSPGKYVGLAETIRGFQLILSGELDGLPEQAFYLVGNIDEATAKAMNLEMESNLK

SEQ ID NO: 1248 - protein, 242 aa, Shigella flexneri
LKERKEGAFVPFVTLRDPGIEQSLKIIDTLIEAGADALELGIPFSDPLADGPTIQNATLRAFAAGVTPAQCFEMLALIRQKHPTIPIGLLMYANLVFNKGIDEFYAQCEKVGVDSVLVADVPVEESAPFRQAALRHNVAPIFICPPNADDDLLRQIASYGRGYTYLLSRAGVTGAENRAALPLNHLVAKLKEYNAAPPLQGFGISAPDHVKAAIDAGAAGAISGSAIGKIIEQHINEPEKML

SEQ ID NO: 1249 - protein, 490 aa, Neorites kevediana
GPGVSALEEKNLGRIAQIIGPVLDVAFPPGKMPNIYNALVVKGRDTVGQQINVTCEVQQLLGNNRVRAVAMSATDGLMRGMEVIDTGAPLSVPVGGATLGRIFNVLGEPVDNLGPVDTRTTSPIHRSAPAFIQLDTKLSIFETGIKVVDLLAPYRRGGKIGLFGGAGVGKTVLIMELINNIAKAHGGVSVFGGVGERTREGNDLYMEMKESGVINEQNIAESKVALVYGQMNEPPGARMRVGLTALTMAEYFRDVNEQDVLLFIDNIFRFVQAGSEVSALLGRMPSAVGYQPTLSTEMGSLQERITSTKEGSITSIQAVYVPADDLTDPAPATTFAHLDATTVLSRGLAAKGIYPAVDPLDSTSTMLQPRIVGEEHYEIAQRVKQTLQRYKELQDIIAILGLDELSEEDRLTVARARKIERFLSQPFFVAEVFTGSPGKYVGLAETIRGFQLILSGELDGLPEQAFYLVGNIDEATAKAMNLEVESNLKK

SEQ ID NO: 1250 - protein, 483 aa, Thomasia solanacea
  unsure (1)..(483): unsure at all Xaa locations
XTLEKEXLGRISQIIGPVLDVAFPPGKMPNIYNALVVKGRDTVGQQINVTCEVQQLLGNNRVRAVAMSATDGLMRGMEVINTGAPLSVPVGGSTLGRIFNVLGEPIDNLGPVDTRTTSPIHKPAPAFIQLDTKLSIFETGIKVVDLLAPYRRGGKIGLFGGAGVGKTVLIMELINNIAKAHGGVSVFGGVGERTREGNDLYMEMKESGVINEQNLAESKVALVYGQMNEPPGARMRVGLTALTMAEYFRDVNEQDVLLFIDNIFRFVQAGSEVSALLGRMPSAVGYQPTLSTEMGTLQERITSTKEGSITSIQAVYVPADDLTDPAPATTFAHLDATTVLSRGLAAKGIYPAVDPLDSTSTMLQPRIVGEEHYETAQRVKQTLQRYKELQDIIAILGLDELSEEDRLTVARARKIERFLSQPFFVAEVFTGSPGKYVGLAETIRGFKLILSGELDGLPEQAFYLVGNIDEATAKATNLEMESK

SEQ ID NO: 1251 - protein, 350 aa, Arabidopsis thaliana
MKPVFCGNFEYDAREGDLERLFRKYGRVERVDMKAGFAFVYMEDERDAEDAIRALDRFEFGRRGRTLRVEWTKSERGGDKRSGGGSRRSSSSMRPSKTLFVINFDADNTRTRDLEKHFEPYGKIVNVRIRRNFAFIQYEAQEDATRALDASNNSKLMDKVISVEYAVKDDDARGNGHSPERRRDRSPERRRRSPTPYKRERGSPDYGRGASPVAAYRKERTSPDYGRRRSPSPYKKSRRGSPEYGRDRRGNDSPRRRERVASPTKYSRSPNNKRERMSPNHSPFKKESPRNGVGEVESPIERRERSRSSPENGQVESPGSIGRRDSDGGYDGAESPMQKSRSPRSPPADE

SEQ ID NO: 1252 - protein, 621 aa, Hordeum vulgare subsp. vulgare
MAHGDRMTTFEESERESEYGYVRKVSGPVVVADGMGGAAMYELVRVGHDSLIGEIIRLEGDSATIQVYEETAGLTVNDPVLRTKKPLSCELGPGILGNIFDGIQRPLKTIAIKSGDVYIPRGVSVPALDKDQLWEFQPNKLGVGDNITNGDLYATVFENTLMKHHIALPPGAMGKISYIAPAGQYSLQDTVLELEFQGIKKEFTMLHTWPVRTPRPVASKLAADTPLLTGQRVLDALFPSVLGGTCAIPGAFGCGKTVISQALSKYSNSDTVVYVGCGERGNEMAEVLMDFPQLTMTLPDGREESVMKRTTLVANTSNMPVAAREASIYTGITIAEYFRDMGYNVSMMADSTSRWAEALREISGRLAEMPADSGYPAYLASRLASFYERAGKVQCLGSPDRTGSVTIVGAVSPPGGDFSDPVTSATLSIVQVFWGLDKKLAQRKHFPSVNWLISYSKYSTALEGYYEKFDPGFIDMRTKAREVLQREDDLNEIVQLVGKDALGESDKITLETAKLLREDYLAQNAFTPYDKYCPFYKSVWMMRNIIHFNQLANQAVERAANADGHKITYAVVKSRMGDLFYRLVSQKFEDPAEGEDVLVAKFQKLYDDLTAGFRNLEDEAR

SEQ ID NO: 1253 - protein, 269 aa, Klebsiella pneumoniae
MERYETLFAQLKNRQEAAFVPFVTLGDPGPEQSLKIIDALIEGGADALELGIPFSDPLADGPTIQGAALRAFAAGVTPAQCFEMLAAIRQKHPTIPIGLLMYANLVFSPGIDAFYAQCARVGVDSVLVADVPVEESAPFRQAAMRHNIAPIFICPPNADDDLLRQIASYGRGYTYLLSRAGVTGAENRAALPLHHLVEKLAEYHAAPPLQGFGISAPEQVSAAIDAGAAGAISGSAIVKIIERHLDEPQTMLDELKAFVQSLKAATKTA

SEQ ID NO: 1254 - protein, 613 aa, Oryza sativa
  unsure (1)..(613): unsure at all Xaa locations
MLAEVVAATVPFPWHRRQSMKKGKGHHPQQGVAQVDSLIDDHCSGIQPRSKRPSLTTPHREKVTTSIAQGKSREKGTTGASCNCFVLAFSFYKRLMNSETAGRASLLASQQPAASRSAEVPNPSKLQQRWGVWPRLAPTSSTNRGTRCGCASRAQVTAARTHTTRHQRRDASPFPPSSAVCLHPPPTPPSPLSPHCRRRLRRPRAHPETTSLASIERSFSPRALVGTAINPLFRAAYLAKDGDREVTLVIPWLSLRDQELVYPNKIVFGSPLEHEAYVRRWIEERISFRPSFSIKFYPAKFSKELRSILPVGDITECIPDEVADVAVLEEPEHLNWYHHGRKWKNKFRRVIGVVHTNYIAYVKREKNGQAIACFMKYMNTWVTRIYCHKIIRLSGATQDLPRSVVCNVHGVNPKFLEVGKLKLKQLRNGEIAFTKGAYYIGKMVWSKGYRELLDLLSKYQSKLVGLEVDLYGSGEDSDEVRKSAELLSLAVKVHPGRDHADPLFHDYKVFINPSTTDVVCTTTAEALAMGKIVICANHPSNEFFKQFPNCRTYDSGEEFVQLTLDALAEQPAPLTDMQSHDLSWEAATERFMEAAELNLPISAEPRIHQTSKX

SEQ ID NO: 1255 - protein, 504 aa, Oryza sativa (japonica cultivar-group)
MKKLFFFLFLLILAASVVHGEDGAYIGVNIGTAMTSVPAPTQITTLLRSQNIRHVRLYDADPAMLAALANTGIRVIVSVPNEQLLAIGNSNATAANWVARNVAAHYPSVNITAIAVGSEVLSTLPNAAPLLMPAIRYLQNALVAAALDRYIKISTPHSSSIILDSFPPSQAFFNRSLDPVLVPLLKFLQSTGSPLMLNVYPYYDYMRSNGVIPLDYALFRPLPPNKEAVDANTLLHYTNVFDAVVDAAYFAMAYLNVTNVPVMVTETGWPHKGDPSNEPDATSDNADTYNSNLIRHVMNTTGTPKHPGVAVPTYIYELYDEDTRPGSTSEKYWGLFDMNGIPAYTLHLTGSGVLLANDTTNQTYCVAREGADEKMLQAALDWACGPGKVDCSALMQGQPCYDPDNVEAHATYAFNAYYHGMGMGSGTCYFSGVAVITTTDPSHGSCVYAGSGGKNGTSLLNGTSLAPSSNSTAGDSGAHRAIGDVSSFVRAVVAALLLSVVLLL

SEQ ID NO: 1256 - protein, 376 aa, Vitreochlamys aulata
VSMNPTEGLMRGMEVLDTGKPLSVPVGKVTLGRIFNVLGEPVDNMGNVKVEETLPIHRTAPAFADLDTRLSIFETGIKVVDLLAPYRRGGKIGLFGGAGVGKTVLIMELINNIAKAHGGVSVFAGVGERTREGNDLYTEMKESGVIVEKNLSDSKVALVYGQMNEPPGARMRVALTALTMAEYFRDVNKQDVLFFIDNIFRFVQAGAEVSALLGRMPSAVGYQPTLATEMGGLQERITSTKDGSITSIQAVYVPADDLTDPAPATTFAHLDATTVLSRNLAAKGIYPAVDPLESTSTMLQPWILGEKHYDIAQSVKKTLQRYKELQDIIAILGLDELSEEDRLIVSRARKIERFLSQPFFVAEVFTGSPGKYVSLA

SEQ ID NO: 1257 - protein, 307 aa, Triticum aestivum
MAEQYGKLCIALDVLHECFVTIIEPRTRRDLSEDIVFNRESGLRRLNFRGFYTILLQKDGELISVGTFRVCGKKFAELPLIGTRIQYRRQGMCRLLMNELEKLLSGLGVERLILPAIPQLLETWTGSFGFTAMSCSQRFELAESSILSFQGTTICQKILDATDHNPRDMSIQLVLNAEEIELGKNSIVSFERTTACDTVVNNASNHSEELKVTAQTNYNSLACDTVVNNASNHSEELKVTAQTNYNSLALAENSVFSSWGTTICQKVSSNAFSHPEELNGSDYQLECTRIVRETLESDSQESTSVGG

SEQ ID NO: 1258 - protein, 362 aa, Oryza sativa
MHPRLRPPARAPRDRTRCAAPPVYFPPADCPLEYRKNAALPLRACMRCTDRDSRELTCLQLPARGHAHPLMALHVVWLRCPWSVDAHVVVVVGGGGGLGLGAAASPPPPPPPPPPQRGLSEPLPASSSSWLTPPSPLWLFDERQLLPLDMGAPAAPATAPPAEAAAVVEEVHRTRSGNSDTTSKRVDQINSKWQFHLSIDDNTDSSCLFKERLTQALRYFKESTDQHLLVQVWAPVKSGDRYVLTTSGQPFVLDQQSIGLLQYRAVSMMYMFSVDGENAGELGLPGRVYKQKVPEWTPNVQYYSSTEYPRLNHAISYNVHGTVALPVFDPSVQNCIAVVELIMTSKKINYAGEVDKVCKALE

SEQ ID NO: 1259 - protein, 739 aa, Arabidopsis thaliana
MVKIKKTKGMRKQIRLNEVEEINLLKQWIESQKPDSGFNPLSLRPLPKDSKIGKSEDGKNGTVFSRYAGVRKFAQLPISDKTKRGLKDAKYVDMTDVQSAAIPHALCGRDILGAARTGSGKTLAFVIPILEKLHRERWSPEDGVGCIIISPTRELAAQTFGVLNKVGKFHKFSAGLLIGGREGVDVEKERVHEMNILVCAPGRLLQHMDETPNFECPQLQILILDEADRVLDSAFKGQLDPIISQLPKHRQTLLFSATQTKKVKDLARLSLRDPEYISVHAEAVTATPTSLMQTVMIVPVEKKLDMLWSFIKTHLNSRILVFLSTKKQVKFVHEAFNKLRPGIPLKSLHGKMSQEKRMGVYSQFIERQSVLFCTDVLARGLDFDKAVDWVVQVDCPEDVASYIHRVGRTARFYTQGKSLLFLTPSEEKMIEKLQEAKVPIKLIKANNQKLQEVSRLLAALLVKYPDLQGVAQRAFITYLRSIHKRRDKEIFDVSKLSIENFSASLGLPMTPRIRFTNLKTKKKGVYESSIAMEIENAQEYEAPLVVKKDLLGEDLEEEDFALKPRKEGKVVEKSTKEEEVLIPGNRVLKNKKLKINLHRPFGSRVVLDEEGNSLAPLASVAAEAGTEVALDEERMNDYYKKVGAEMRKADIEDKKVDKERRREKRMKQKIKRKRGAMEDEEEEEEEDHDGSGSSDDETGRNSKRAKKIVSDNEENGGKINTDSLSVADLEEMALKFITQ

SEQ ID NO: 1260 - protein, 509 aa, Oryza sativa
  unsure (1)..(509): unsure at all Xaa locations
RSLSPTNTYDFERKVLAPLDRSLSAHQVFVESAEMGENGVDSKLYDDDGRLKRTGTMWTASAHIITAVIGSGVLSLGWAIAQLGWVAGPAVMLLFSFVTYYTSALLADCYRXSGDESTGKRNYTYMDAVNANLSGIKVQVCGFLQYANFVGVAIGYTIAASISMLAIKRANCFHVEGHGDPCNISSTPYMIIFGVAEIFFSQIPDFDQISWLSILAAVMSFTYSTIGLGLGVVQVVANGGVKGSLTGISIGVVTPMDKVWRSLQAFGDIAFAYSYSLILIEIQDTIRAPPPSESRVMRRATVVSVAVTTLFYMLCGCTGYAAFGDAAPGNLLTGFGFYEPFWLLDVANAAIVVHLVGAYQVYCQPLFAFVEKWAQQRWPKSWYITKDIDVPLSLSGGGGGGGRCYKLNLFRLTWRSAFVVATTVVSMLLPFFNDVVGFLGAVGFWPLTVYFPVEMYIVQKRIPRWSTRWVCLQLLSLACLAITVAXSAAGSIAGILSDLKVYKPFATTY

SEQ ID NO: 1261 - protein, 470 aa, Salmonella enterica subsp. enterica serovar Typhi
MKKTKIVCTIGPKTESEEMLSKMLDAGMNVMRLNFSHGDYAEHGQRIQNLRNVMSKTGKKAAILLDTKGPEIRTIKLEGGNDVSLKAGQTFTFTTDKSVVGNNEIVAVTYEGFTSDLSVGNTVLVDDGLIGMEVTAIEGNKVICKVLNNGDLGENKGVNLPGVSIALPALAEKDKQDLIFGCEQGVDFVAASFIRKRSDVVEIREHLKAHGGENIQIISKIENQEGLNNFDEILEASDGIMVARGDLGVEIPVEEVIFAQKMMIEKCIRARKVVITATQMLDSMIKNPRPTRAEAGDVANAILDGTDAVMLSGESAKGKYPLEAVSIMATICERTDRVMNSRLDYNNDSRKLRITEAVCRGAVETAEKLKAPLIVVATQGGKSARAVRKYFPDATILALTTNEVTARQLVLSKGVVSQLVKEINSTDDFYRLGKDVALQSGLAQKGDVVVMVSGALVPSGTTNTASVHVL

SEQ ID NO: 1262 - protein, 443 aa, Helicobacter pylori 26695
MSKLNMTPREIVAYLDEYIIGQKEAKKSIAIAFRNRYRRLQLEKSLQEEITPKNILMIGSTGVGKTEIARRIAKIMELPFVKVEASKYTEVGFVGRDVESMVRDLVNNSVLLVENEHKEKLKDKIEEAVIEKIAKKLLPPLPNGVSEEKKQEYANSLLKMQQRIAQGELDSREIEIEVRKKSIEIDSNVPPEILRVQENLIKVFHKEQDKVKKTLSVKEAKEALKAEISDTLLDSEAIKMEGLKRAESSGVIFIDEIDKIAVSSKEGSRQDPSKEGVQRDLLPIVEGSVVNTKYGSIKTEHILFIAAGAFHLSKPSDLIPELQGRFPLRVELENLTEEIMYMILTQTKTSIIKQYQALLKVEGVEIAFEDDAIKELAKLSYNANQKSEDIGARRLHTTIEKVLEDISFEAEDYSGQNVTITKELVQSKLEDLVADENLVKYIL

SEQ ID NO: 1263 - protein, 250 aa, Streptomyces avermitilis MA-4680
MPKKGSRPDRPSRRCARMTSTVPALGTRSAEGSALQAVLLDMDGTLVDTEGFWWDVEAEVFAALGHPLDESWRHVVVGGPMARSAGFLIEATGADITLAELTVLLNDGFEARIGRTLPLMPGAARLLAELAAHEIPTALVSASHRRIIDRVLTSLGSQHFALTVAGDEVARTKPFPDPYLLAASGLGAEPARCAVIEDTATGVAAAEAAGCRVVAVPSVAPIAPAARRTVVTSLEEVDLPFLRGLMTEMR

SEQ ID NO: 1264 - protein, 313 aa, Sorghum bicolor
EFGTRSLPCLQQQWSLPRFAAAATSVRAIGVCYGVIGSGLPSKSDVVQLYKSNGITSMRFYFADKDLLTALRGSGISLALDVGNDKVGELASDSAAAASWVRDNVQAYYPDVDIRYVVVGNEVPGAASVLQAMQNVHAALASAGLAGNVRVSTAVKMDAIENSSPPSSGVFKDPAAMSPIVQFLAGNGAPLLANVYPYFAYEYSDGIDLNYALFQPSSTTVTDPANGLVYTNLFDAMVDAVRAALDKAGGGGGVDVVVSESGWPSADGKGATVDNARTYNQNLINHAGKGTPRKPGSMEVYVFAMFNENQKDS

SEQ ID NO: 1265 - protein, 486 aa, Chorisia speciosa
  unsure (1)..(486): unsure at all Xaa locations
DSTLXKRNLGRISQIIGPVLDVAFPPGKMPNIYNALVVKGRDTAGQQINVTCEVQQLLGNNRVRAVAMSATDGLTRGMEVIDTGAPLSVPVGGATLGRIFNVLGEPVDNLGPVDTRTTSPIHKPAPAFIQLDTKLSIFETGIKVVDLLAPYRRGGKIGLFGGAGVGKTVLIMELINNIAKAHGGVSVFGGVGERTREGNDLYMEMKESGVINEQNLAESKVALVYGQMNEPPGARMRVGLTALTMAEYFRDVNEQDVLLFIDNIFRFVQAGSEVSALLGRMPSAVGYQPTLSTEMGSLQERITSTKEGSITSIQAVYVPADDLTDPAPATTFAHLDATTVLSRGLAAKGIYPAVDPLDSTSTMLQPRIVGEEHYETAQRVKQTLQRYKELQDIIAILGLDELSEEDRLTVARARKIERFLSQPFFVAEVFTGSPGKYVGLAETIRGFKLILSGELDGLPEQAFYLVGNIDEATAKATNLEMESKLK

SEQ ID NO: 1266 - protein, 117 aa, Triticum aestivum
MNLHNTCQQEQLSGSNSARLQTFWTICPACDTKYQYHHASAQKTVRCQNCSKAFIAHVLTDQHVPTGPEQSVWKNAGVFSEIRLLQKFKPGQIWALYSDIDKYPNCYAFIEKVELEN

SEQ ID NO: 1267 - protein, 500 aa, Hordeum vulgare
MKGNYVQVYVMLPLDAVSVNNRFEKGDELRAQLRKLVEAGVDGVMVDVWWGLVEGKGPKAYDWSAYKQLFELVQKAGLKLQAIMSFHQCGGNVGDAVNIPIPQWVRDVGTRDPDIFYTDGHGTRNIEYLTLGVDNQPLFHGRSAVQMYADYMTSFRENMKDFLDAGVIVDIEVGLGPAGELRYPSYPQSHGWSFPGIGEFICYDKYLQADFKAAAAAVGHPEWEFPNDAGQYNDTPERTQFFRDNGTYLSEKGRFFLAWYSNNLIKHGDRILDEANKVFLGYKVQLAIKIAGVHWWYKVPSHAAELTAGYYNLHDRDGYRTIARMLKRHRASINFTCAEMRDSEQPPDAMSAPEELVQQVLSAGWREGLNVSCENALPRYDPTAYNTILRNARPHGINQSGPPEHKLFGFTYLRLSNQLVEGQNYVNFKTFVDRMHANLPRDPYVDPMAPLPRSGPEISIEMILQAAQPKIQPFPFQEHTDLPVGPTGGMGGQAEGPTCG

SEQ ID NO: 1268 - protein, 263 aa, Clostridium acetobutylicum
MANKIDLKFKELKYKNKKAMIPFVTSGYPDVETTKKIVIEMEKSGADLIELGIPYSDPVADGPIIQISSSGALNNGLKIKDIMNMVKEVRKNVKIPIVYMGYFGCVFKYGLEKFIKDSKESGVDGIVIPDLPLEERERVKEIADRYEFYIIPLVAPTSEDRIGKIVNGAKGFIYCVSTNGVTGVRNIIANDVKAYIDVVSKASNVPKCIGFGISSPEMAQKMKEYCDGVIIGSAVMKIVEEDIPKEEMIRKVGEFISQVNEVL

SEQ ID NO: 1269 - protein, 545 aa, Solanum tuberosum
MTLTLQSSASFINFKETKGVKAPDEFLGMVSFAQAKPSCRLVAKSSMQEAQLSHERIMEVKKIEKREKLHELPANHSNRSTRVPVFVMLPLDTMTMGGNLNRPRAMNASLMALKSSGAEGVMVDAWWGLVEKDGPLKYNWEGYAELVKMCQEHGLKLQVVMSFHQCGGNVGDSCSIPLPPWVLEEISKNPDLVYTDRSGRRNPEYLSLGCDMLPVLKGRTPIQVYTDYMRSFRERFNEYLGNVIVEIQVGMGPCGELRYPAYPESNGTWRFPGIGEFQCYDKYMGASLAAVAKAAGKDDWGQGGPHDSGKYNQFPEDTGFFQRDGTWNSEYGQFFLEWYSGKLLEHGDRILAAGESIYQGTGAKLSGKVAGIHWHYNTRSHAAELTSGYYNTRHRDGYLPIARMLAKHGAVLNFTCMEMRDGEQPQSANCSPEGLVRQVKTAARTAEVELAGENALERYDGGAFSQVLATSMSDSGNGLSAFTFLRMNKRLFEPENWRNLVQFVKSMSEGGRNASLPECDSSRTDLYVRFIKESHSKKATEVAVV

SEQ ID NO: 1270 - protein, 486 aa, Keraudrenia hermanniifolia
  unsure (1)..(486): unsure at all Xaa locations
XGVSTLEKXNLGRISQIIGPVLDVAFPPGKMPNIYNALVVKSRDTVGQQINVTCEVQQLLGNNRVRAVAMSATDGLMRGMEVIDTGAPLSVPVGGATLGRIFNVLGEPIDNLGPVDTRTTSPIHKPAPAFIQLDTKLSIFETGIKVVDLLAPYRRGGKIGLFGGAGVGKTVLIMELINNIAKAHGGVSVFGGVGERTREGNDLYMEMKESGVINEQNLAESKVALVYGQMNEPPGARMRVGLTALTMAEYFRDVNEQDVLLFIDNIFRFVQAGSEVSALLGRMPSAVGYQPTLSTEMGSLQERITSTKEGSITSIQAVYVPADDLTDPAPATTFAHLDATTVLSRGLAAKGIYPAVDPLDSTSTMLQPRIVGEEHYETAQRVKQTLQRYKELQDIIAILGLDELSEEDRLTVARARKIERFLSQPFFVAEVFTGSPGKYVGLAETIRGFKLILSGELDGLPEQAFYLVGNIDEATAKATNXXXESK

SEQ ID NO: 1271 - protein, 420 aa, Oryza sativa
AGSSSAKLVAACVIGGIVLGASVVALHLAGPVAIPALPPVDALRRRFRRGRRRPVRVYMDGCFDMMHYGHCNALRQARALGDELIVGVVSDHEITANKGPPVTPLHERLIMVRAVKWVHDVIPDAPYAITEDFMNKLFNEYNIDYIIHGDDPCLLPDGTDAYALAKKVGRFKQIKRTEGVSTTDIVGRMLLCVRERSASDSHNHSSLQRQFSHGHGQKIDDSGSGSGTRISHFLPTSRRIVQFSNSRGPGPDSRIVYIDGAFDLFHAGHVEILRLARELGDFLLVGIHTDQTISSTRGPHRPIMNLHERSLSVLACRYVDEVIIGAPWDVSKDMITTFNISLVVHGTIAENMDFMKDDLNPYAVPRAMGIYRRLESPLDITTSTIIRRIVANHEAYQKRNEKKEASEKKYYDSKSFVNGE

SEQ ID NO: 1272 - protein, 617 aa, Saccharomyces cerevisiae
MAGAIENARKEIKRISLEDHAESEYGAIYSVSGPVVIAENMIGCAMYELVKVGHDNLVGEVIRIDGDKATIQVYEETAGLTVGDPVLRTGKPLSVELGPGLMETIYDGIQRPLKAIKEESQSIYIPRGIDTPALDRTIKWQFTPGKFQVGDHISGGDIYGSVFENSLISSHKILLPPRSRGTITWIAPAGEYTLDEKILEVEFDGKKSDFTLYHTWPVRVPRPVTEKLSADYPLLTGQRVLDALFPCVQGGTTCIPGAFGCGKTVISQSLSKYSNSDAIIYVGCGERGNEMAEVLMEFPELYTEMSGTKEPIMKRTTLVANTSNMPVAAREASIYTGITLAEYFRDQGKNVSMIADSSSRWAEALREISGRLGEMPADQGFPAYLGAKLASFYERAGKAVALGSPDRTGSVSIVAAVSPAGGDFSDPVTTATLGITQVFWGLDKKLAQRKHFPSINTSVSYSKYTNVLNKFYDSNYPEFPVLRDRMKEILSNAEELEQVVQLVGKSALSDSDKITLDVATLIKEDFLQQNGYSTYDAFCPIWKTFDMMRAFISYHDEAQKAVANGANWSKLADSTGDVKHAVSSSKFFEPSRGEKEVHGEFEKLLSTMQERFAESTD

SEQ ID NO: 1273 - protein, 270 aa, Triticum aestivum
  unsure (1)..(270): unsure at all Xaa locations
MADGKRSVAETFSRLRERGKTAFIPFITAGDPDLATTSKALRILDSCGSDVIELGVPYSDPLADGPVIQAAASRALKKGTTLGSVLAMLTEVIPELSCPIVLFTYYNPILKNGVRNFMGXIKQAGVHGLVVPDLPLEETTLLRSEATMHNIELVLLTTPXTTPTERMKEITKASEGFVYLVSAVGVTGARSNVNLRVEHLLKEIKQVTDKPVAVGFGISTPEHAKQIAGWGADGVIIGSAIVRQLGEAASPEEGLRRIEEYAKSIKAAIP

SEQ ID NO: 1274 - protein, 450 aa, Prochlorococcus marinus subsp. marinus str. CCMP1375
MAKFEAHLKCSFCGKSQEQVRKLIAGPGVYICDECIDLCNEILDEELLENPSKVKDGNDSKIPTSASTVSKPAPTLSSIPKPIEIKSFLDNQVVGQEDAKKILSVAVYNHYKRLAWQGSETNEIDLHTTKLHKSNILLIGPTGSGKTLLAQTLAELLDVPFAVADATTLTEAGYVGEDVENILLRLLQKSDMDVELAQRGIIYIDEIDKIARKSENPSITRDVSGEGVQQALLKMLEGTIANVPPQGGRKHPYQDSIQIDTSQILFICGGAFVGLEDIVQKRLGRNSIGFMTNDNRGKSRKSNDLPKNQVLNNLEPDDLVRYGLIPEFIGRMPVSAVLEPLDVDALEAILQEPRDAVIKQFITLMSMDNVKLTFEENAIKSIAKEAFRRKTGARALRGIVEELMLELMYKLPSQDEIKNCSVTQAMVEAITGGKIVPLPPSDKRATKESA

SEQ ID NO: 1275 - protein, 359 aa, Enterococcus hirae
MQIGKIIKVSGPLVMAENMSEASIQDMCLVGDLGVIGEIIEMRQDVASIQVYEETSGIGPGEPVRSTGEALSVELGPGIISQMFDGIQRPLDTFMEVTQSNFVGRGVQLPALDHEKPWWFEGTIEGGTEGSSGNLIGYLDETKVIQPKIMVPNGIKGTVQKIESGSFTIDDPICVIETEQGLKELTMMQKWPVRRGRPIKQKLNPDVPMITGQRVIDTFFPVTKGGAAAVPGPFGAGKTVVQHQIAKWSDVDLVVYVGCGERGNEMTDVVNEFPELIDPNTGESLMERTVLIANTSNMPVAAREASIYTGITIAEYFRKMGNKLAIMANSPFWWAEAPPENSRRLEEMPGDEGYPAYLG

SEQ ID NO: 1276 - protein, 230 aa, Magnetospirillum magnetotacticum
EVPALPEAVLWDMDGTLVDTEPYWIAAEHELVAAHGGTWTHEDAMSLVGNPLRESARILRERGGVDLPVDEIVAFLIGRVIEQVRVEVPWQPGARELLTALGEAGVPCALVTMSYRELAQPVAEMAPPDAFQVLVCGDEVERGKPDPEPYLLAAQRLGVDVTRCVAIEDSPAGIASARAAGAATLGVEAVVPVLPAPGLSRTPSLELVDVALLSRLVAGDVVDLMEDDAA

SEQ ID NO: 1277 - protein, 591 aa, Streptococcus pyogenes SSI-1
MNQGKIITVSGPLVVASGMQEANIQDICRVGHLGLVGEIIEMRRDQASIQVYEETSGIGPGEPVVTTGCPLSVELGPGLISEMFDGIQRPLDRFQKATDSDFLIRGVAIPSLDRKAKWAFIPKLSVGQEVVAGDILGTVQETAVIEHRIMVPYKVSGTLVAIHAGDFTVTDTVYEIKQEDGSIYQGSLMQTWPVRQSRPVAQKLIPVEPLVTGQRVIDTFFPVTKGGAAAVPGPFGAGKTVVQHQIAKFANVDIVIYVGCGERGNEMTDVLNEFPELIDPNTGQSIMERTVLIANTSNMPVAAREASIYTGITIAEYFRDMGYSVAIMADSTSRWAEALREMSGRLQEMPGDEGYPAYLGSRIAEYYERAGRVRTLGSQEREGTITAIGAVSPPGGDISEPVTQNTLRIIKVFWGLDAPLAQRRHFPAINWLTSYSLYQDDVGSYIDRKQESNWSNKVTRAMAILQREASLEEIVRLVGLDSLSEQDRLTMAVARQIREDYLQQNAFDSVDTFTSFPKQEAMLTNILTFNEEASKALSLGAYFNEIMEGTAQVRDRIARSKFIPEENLEQIKGLTQKVTKEIHHVLAKGGI

SEQ ID NO: 1278 - protein, 76 aa, Triticum aestivum
KGLIVSDVPYAETCPFRNEAIKNNLELVLLTTPATPAERMKKITSASEGFVYLVSVNGVTGPRPNVNPRVKDLLKE

SEQ ID NO: 1279 - protein, 183 aa, Chlamydia trachomatis
MSKLTQVFKQTKPCIGYLTAGDGGTSYTIEAAKALIQGGVDILELGFPFSDPVADNPEIQVSHDRALAENLTSETLLEIVEGIRAFNQEVPLILYSYYNPLLQRDLDYLRRLKDAGINGVCVIDLPAPLSHGEKSPFEDLLAVGLDPILLISAGTTPERMSLIQEHARGLLYYIPYKLREILK

SEQ ID NO: 1280 - protein, 343 aa, Populus x canescens
MARSNIAGKSPSMVSIMLLFGLLLASLDATGAQIGVCYGMNGNLPPAQEVIELYSQRGIRRMRLYDPNQDALRALQGTNIELMLGVPNADLQRIASSQTNANAWVQRNVRSFGNVRFRYIAVGNEVRPFDSYAQFLVPAMKNIRNALYSAGLGNIKVSTAIDNGVIEDDSSPPSKGSFRGDHRPFLDPIIRFLLNNQAPLLVNLYPYLSYTGNSEDIRLDYALFTAPSSLVSDPPLNYQNLFDAILDTVYAALEKSGGGSLDIVVSESGWPTAGGTGTSVDNARIYNNNLVQHVKRGTPKKPGKPIETYIFSMFDETYKNPELEKHWGIFLPNKQPKYNINLR

SEQ ID NO: 1281 - protein, 421 aa, Chlamydophila caviae GPIC
MNKKNLTICSFCGRSEKDVEKLIAGPSVYICDYCIKLCSGILDKKPTSTPSSGTPTETTPQHSDLQVLTPKEIKKHIDKYVVGQERAKKTIAVAVYNHYKRIRALLNNKHVSYGKSNVLLLGPTGSGKTLIAKTLAKILDVPFTIADATTLTEAGYVGEDVENIVLRLLQAADYNVARAERGIIYIDEIDKIGRTTANVSITRDVSGEGVQQALLKIIEGTTANVPPKGGRKHPNQEYIRVNTENILFIVGGAFVNLDKIIAKRLGKTTIGFSDDLGDFSQEDRDHLLTKVETEDLIAFGMIPEFVGRFNCIVNCEELSLDELVAILTEPTNAIVKQYIELFSEENVKLIFEKDALYAIAKKAKLAKTGARALGMILENLLRDLMFEIPSDPTVEAIRIQEDTILENKAPVIIRRTPEAIA

SEQ ID NO: 1282 - protein, 680 aa, Neurospora crassa
MASEEGPSRSASPTNVDNTFPQYPPRAELTVAGPPSLISSRMTDIGTEDGQGSDTTPRGGGPSSANPNRRSGFYSDTQSRPETSGTGLSSRGPWAQSVPLRQQLTGKRGSIAGSIGSAGGRPISAASRSHVPSLTSHGFFRPMSSQKLQAQRGAGRPPTMNRPYVITGEAGARNSVISTGSGRIGAQIAEDAELRMPSRGTEMTEQETMERMTANTSPINGFFPTSSVTDSVRPLQSPVDARNINVEMNKDYREESPTTPPRSPTRTSRSFRSSFLMPRMNESGITGSNREIEGGEKLQSAASSPNIPPQSYERQRARFKRRAKRQNRANLGKNYEYFEGNTVFCLGGRFQNTKQRPINIATGSLIVLPCILFFIFSAPWIWHNISPAIPVTFAYLAYICVSSFLHASASDPGILPRNLHKFPPPEMEDSPTGPPTTDWVLVHSAEASTAAMEVPIKYCKTCQLWRPPRAHHCRLCDNCVETQDHHCVWLNNCVGRRNYRYFFTFVSSATVLALYLIGACLAQILVYKNQHHISFGHAVNHFRVPFAMVFFGFLTFLYPAALTGYHIFLMARGETTREYLNSHKFPKSDRYRAFTQANWLKNWFVVLCRPRPPTYYGFKVKYNQGDQRLGSHRRWQQPAVSDSKEGMEMQNVSPQLPQTGFMGPTALRNSNNGSTAEVRA

SEQ ID NO: 1283 - protein, 80 aa, Brassica napus
PKELRNLEGRLDRSVNRIRSKKNELLFAEIDYMQKREVDLHNDNQLLRAKIAENERNNPSMSLMPGGSNYEQIMPPPQTQ

SEQ ID NO: 1284 - protein, 456 aa, Bixa orellana
IGPVLDVAFPPGKMPNIYNALVVKGQDTVGQQINVTCEVQQLLGNNRVRAVAMSATDGLMRGMEVLDTGAPLSVPVGGTTLGRIFNVLGEPVDNLGPVDTRTTSPIHKPAPAFIQLDTKLSIFETGIKVVDLLAPYRRGGKIGLFGGAGVGKTVLIMELINNIAKAHGGVSVFGGVGERTREGNDLYMEMKESGVINEQNLAESKVALVYGQMNEPPGARMRVGLTALTMAEYFRDVNEQDVLLFIDNIFRFVQAGSEVSALLGRMPSAVGYQPTLSTEMGSLQERITSTKEGSITSIQAVYVPADDLTDPAPATTFAHLDATTVLSRGLAAKGIYPAVDPLDSTSTMLQPRIVGEEHYETAQIVKQTLQRYKELQDIIAILGLDELSEEDRLTVARARKIERFLSQPFFVAEVFTGSPGKYVGLAETIRGFKLILSGELDGLPEQAFYLVGNIDE

SEQ ID NO: 1285 - protein, 269 aa, Pseudomonas putida KT2440
MSRLEQRFAELKAEGRSALVTFVTAGDPGYDASLQILKGLPAAGADVIELGMPFTDPMADGVAIQLATLRALEAGQTLVKTLQMVREFRVDNQTTPIVLMGYYNPIHRFGVDTFVTQAKEAGVDGLIIVDLPPEHDAELATPAQAAGIDFIRLTTPTTDDARLPRVLERSSGFVYYVSVAGVTGAGSATTEHVTEAIARLRRHTDLPISVGFGIRTPEQAANIARLADGVVVGSALVDKIAQAKSADQAVTDVLSLCSALAEGVRGARR

SEQ ID NO: 1286 - protein, 226 aa, Brassica oleracea var. capitata
LDACGSDIIELGVPYSDPLADGPVIQAAATRSLEKGTNLDSILDMLDKVLPELSCPVSLFTYYNPILKRGLGKFMSSIRDVGVQGLVVPDVPLEETEFLRKEALNNSIELVLLTTPTTPTERMKRIVDASEGFIYLVSSIGVTGARASVSGKVQSLLKDIKEATDKPVAVGFGISKPEHVKQIAGWGADGVIVGSAMVRLLGDAKSPTEGLKELESLTKSLKSALL

SEQ ID NO: 1287 - protein, 351 aa, Triticum sp.
MSDVTAVMDLEVEEPQLALPPGFRFHPTDEEVVTHYLTRKVLRESFSCQVITDVDLNKNEPWELPGLAKMGEKEWFFFAHKGRKYPTGTRTNRATKKGYWKATGKDKEIFRGKGRDAVLVGMKKTLVFYTGRAPSGGKTPWVMHEYRLEGELPHRLPRTAKDDWAVCRVFNKDLAARNAPQMAPAADGGMEDPLAFLDDLLIDTDLFDDADLPMLMDSPSGADDFAGASSSTCSAALPLEPDAELPVLHPQQQQSPNYFFMPATANGNLGGAEYSPYQAMGDQQAAIRRYCKPKAEVASSSALLSPSLGLDTAALAGAETSFLMPSSRSYLDLEELFRGEPLMDYSNMWKI

SEQ ID NO: 1288 - protein, 573 aa, Streptococcus pyogenes MGAS315
MQEANIQDICRVGHLGLVGEIIEMRRDQASIQVYEETSGIGPGEPVVTTGCPLSVELGPGLISEMFDGIQRPLDRFQKATDSDFLIRGVAIPSLDRKAKWAFIPKLSVGQEVVAGDILGTVQETAVIEHRIMVPYKVSGTLVAIHAGDFTVTDTVYEIKQEDGSIYQGSLMQTWPVRQSRPVAQKLIPVEPLVTGQRVIDTFFPVTKGGAAAVPGPFGAGKTVVQHQIAKFANVDIVIYVGCGERGNEMTDVLNEFPELIDPNTGQSIMERTVLIANTSNMPVAAREASIYTGITIAEYFRDMGYSVAIMADSTSRWAEALREMSGRLQEMPGDEGYPAYLGSRIAEYYERAGRVRTLGSQEREGTITAIGAVSPPGGDISEPVTQNTLRIIKVFWGLDAPLAQRRHFPAINWLTSYSLYQDDVGSYIDRKQESNWSNKVTRAMAILQREASLEEIVRLVGLDSLSEQDRLTMAVARQIREDYLQQNAFDSVDTFTSFPKQEAMLTNILTFNEEASKALSLGAYFNEIMEGTAQVRDRIARSKFIPEENLEQIKGLTQKVTKEIHHVLAKGGI

SEQ ID NO: 1289 - protein, 1642 aa, Oryza sativa (japonica cultivar-group)
MAFEMYGMLVGNVSALTGEYVKPAYGGEKEAFLKKVVTPIYLTIAKEAERSKREKGNHSEWRNYDDLNEYFWSAECFRLGWPMRADADFFCQHLNSPDQRNETTRTEKQKGKVNFVELRSFWHIFRSFDRMWSFFILALQVMVILAWNGGSLGNIFDPVVFKKILSIFITSAILNLGQATLDIIFNWKARRTMEFAVKLRYVLKFTLAALWVVLLPVTYAYTWENPTGIIRAIKGWFGNGQNHPSLFVLAVVIYLSPSLLAAILFLLPFLRRILESSDYKFVRFVMWWSQLTTDQDNVENIVVSYYLRRRPDMTKQNPRLFVGRGMHESAFSLFMYTMFWIALLLIKFAFSYYVEIKPLVEPTKDIMKLPIHTFQWHEFFPKANGNIGVVIALWAPIILVYFMDTQIWYTIFSTLLGGIYGAFQRLGEIRTLGMLRSRFGSIPLAFNACLIPAEESDAKRKKGLKSYLHSRFERKHTDKEKIAARFAQMWNEIITSFREEDLINNKEKELLLVPYVADQALEIMQWPPFLLASKIPIAVDMAKDSNGKDRDLKKRLENDYYFKCAIEECYASFKNIIKDLVQGEPEKRVINTIFAEVEKYIADDKVITDLNMHALPDLYNKFVELVKYLEKNDKNDRDAVIKIFQDMLEVVTRDIMEDQLSSILESSHGGSYQRPEGTTTWDQEYQLFQPAGAIKFPVQFTDAWIEKIKRLELLLTVKESAMDVPSNLEARRRLTFFTNSLFMDMPDAPKVRNMLSFSALTPYYNEPVLFSIKELQEENEDGVSTLFYLQKIYPDEWKNFQQRVEWDEELKENEDKNEELRLWASYRGQTLARTVRGMMYYRKALVLEAFLDMAKHEDLMEGYKAVESTDEQWKLQRSLFAQCEAVADMKFTYVVSCQQYGNDKRAALPNAQDILQLMRTYPSLRVAYIDQVEDRVEEKKMEPAYYSTLVKVALTKDSESTDPVQNLDQKWIKCESSFCDPVKLQHLHFFVFKVIYRIKLPGPAMLGEGKPENQNHAIIFTRGEGLQTIDMNQDNYMEEALKMRNLLQEFLTEHGVRRPSILGVREHIFTGSVSSLAWFMSNQEHSFVTIGQRLLANPLKVRFHYGHPDVFDRIFHLTRGGVSKASRSINLSEDIFAGYNSTLRGGNITHHEYVQVGKGRDVGLNQISKFEAKVANGNGEQTLSRDIYRLGHRFDFFRMLSCYFTTVGFYFSTLLTVVTVYVFLYGRLYLALSGLEEGLLTQRRYIHNHPLQVALASQSLVQLGFLMALPMMMEIGLEKGFGQALSEFIMMNLQLAAVFFTFSLGTKTHYYGRMLLHGGAQYRATGRGFVVFHAKFAENYRLYSRSHFVKGIELLILLIIYQLFGQSYRSTIAYIFVTFSMWFLVLTWLFAPFLFNPSGFEWTKIVDDWSDWNKWISNRGGIGVSPDKSWESWWEIELEHLKYSGTIGLFVEIILSLRFFIYQYGLVYHLNITGDKSILVYLISWLVILVVLLVMKTVSVGRRRFSADFQLFFRLIKFMIFVSFIAILIVLIAILHMTLRDIFVCFLAFLPSGWGILLIAQACKPLARRAGLWGSVRALARAYEIIMGVLLFTPITILAWFPFVSEFQTRMLFNQAFSRGLQISRILGGQKKERERSSRNKD

SEQ ID NO: 1290 - protein, 443 aa, Mesorhizobium loti
MAKWNLAMTTFSPREIVSELDRFIIGQKDAKRAVAIALRNRWRRQQLEGQMREEVMPKNILMIGPTGVGKTEISRRLARLAGAPFVKVEATKFTEVGYVGRDVEQIIRDLVEIAIGLVREKMREDVKARAHINAEERVLEALVGKTASPATRDSFRKKLRDGELDDKEIEIEVADTGNGGMPGFEIPGMPGANIGVLNINDMLSKAMGGKKTKSRKTTVKESYDLLVSDESDKLLDQDEVVRRALDATENDGIVFLDEIDKIAARSDISGGPSREGVQRDLLPLVEGTTVATKYGPVKTDHILFIASGAFHVSKPSDLLPELQGRLPIRVELRALEKQDFVRILTETEASLIKQYIALMKTEGVDLTFTDDAIDSLAGIAVDLNDSVENIGARRLQTVMERVLDEISYDAPDRNGTSVTIDAAYVEKHVGDLSRNTDLSRFIL

SEQ ID NO: 1291 - protein, 249 aa, Fragaria x ananassa
MAYENKPNTDLDADAQRRLGRGKIEIKRIENTTNRQVTFCKRRNGLLKKAYELSVLCDAEVALIVFSNRGRLYEYSNNSSVRETIERYKKACADTSTNGSASEATTQYYQQEAAKLHNQINALQNINRGYMAEGLSNKNIKELKGMERKLERAITRIRSKKNELLFAEIEYMQKRELDLHNNNQLLRAKIAENERQQQSIIAITGGHGSYEIVQPTQPFHEARNYFQVNALQPNIHQYSCHDQVSLQLV

SEQ ID NO: 1292 - protein, 493 aa, Calibanus hookeri
MRINPTTSGSAVSTLDEKNLGHIAQIIGPVLDVVFPPGKMPNIYNALVVKGRDTVGQQINVTCEVQQLLGNNRVRAVAMSATDGLTRGMEVIDTGAPLSVPVGGATLGRIFNVLGEPVDNLGPVDTRTTSPIHRSAPAFIQLDTKLSIFETGIKVVDLLAPYRRGGKIGLFGGAGVGKTVLIMELINNIAKAHGGVSVFGGVGERTREGNDLYMEMKESGVINEKNIAESKVALVYGQMNEPPGARMRVGLTALTMAEYFRDVNEQDVLLFIDNIFRFVQAGSEVSALLGRMPSAVGYQPTLSTEMGSLQERITSTKEGSITSIQAVYVPADDLTDPAPATTFAHLDATTVLSRGLAAKGIYPAVDPLDSTSTMLQPGIVGEEHYETAQKVKQTLQRYKELQDIIAILGLDELSEEDRLTVARARKIERFLSQPFFVAEVFTGSPGKYVGLAETVRGFQLILSGELDSLPEQAFYLVGNIDEATAKTMNLEME

SEQ ID NO: 1293 - protein, 224 aa, Streptococcus pneumoniae
MPKTLTEKLNAIKAAGKGIFVPYIMAGDHEKGLDGLAETIHFLEDLGVSAIEVGIPFSDPVADGPVIEEAGLRSLAHGTSTQALVETLKTIETEIPLVIMTYFNPLFQYGVENFVKDLADTAVKGLIIPDLPHEHANFVEPFLADTDIALIPLVSLTTGIERQKELIEGAEGFIYAVAINGVTGKSGNYRADLDKHLAQLHQVADIPVLTGFGVSSQADLERFN

SEQ ID NO: 1294 - protein, 541 aa, Oryza sativa
  unsure (1)..(541): unsure at all Xaa locations
MTCRYVYACFKIHADIFRQVVLGYVLFFFSHLGRFGKNGITTSSTINKNMDGGGCCSCRGSCTLAFNRGANLALAGTETVDPTVSSAIQFRSGASMLHQDVHYKLVTSRAPVVASRLRAWPPQIERESRLPLRFSSPPRDLTAGDDPLPPPAAAAAPPPPPATTTMSYDRVTTFEDSEKESEYGYVRKVSGPVVVADGMGGAAMYELVRVGNDNLIGEIIRLEGDSATIQVYEETAGLMVNDPVLRTRKPLSVELGPGILGNIFDGIQRPLKTIAIKSGDVYIPRGVSVPALDKDQLWDFEPKKLGVGDAITGGDLYATVFENTLMKHHVALPPGSMGKISYIAPAGQYSLQDTVLELEFQGIKKQFTMLQTWPVRSPRPVSSKLAADTPLLTGQRVLDALFPSVLGGTCAIPGAFGCGKTVISQALSKYSNSEAVVYVGCGERGNEMAEVLMDFPQLTMTLPDGREESVMKRTTLVANTSNMPVAAREASIYTGITIAEYFRDMGYNVSMMADSTSRWAEALREISGRLVXCFLSRCYXX

SEQ ID NO: 1295 - protein, 575 aa, Arabidopsis thaliana
MLEKVETFDMNRVIDEFDEMTRNAHQVQKQTLKEILLKNQSAIYLQNCGLNGNATDPEEAFKSMVPLVTDVELEPYIKRMVDGDTSPILTGHPVPAISLSSGTSQGRPKFIPFTDELMENTLQLFRTAFAFRNRDFPIDDNGKALQFIFSSKQYISTGGVPVGTATTNVYRNPNFKAGMKSITSPSCSPDEVIFSPDVHQALYCHLLSGILFRDQVQYVFAVFAHGLVHAFRTFEQVWEEIVTDIKDGVLSNRITVPSVRTAMSKLLTPNPELAETIRTKCMSLSNWYGLIPALFPNAKYVYGIMTGSMEPYVPKLRHYAGDLPLVSHDYGSSEGWIAANVTPRLSPEEATFAVIPNLGYFEFLPVSETGEGEEKPVGLTQVKIGEEYEVVITNYAGLYRYRLGDVVKVIGFYNNTPQLKFICRRNLILSINIDKNTERDLQLSVESAAKRLSEEKIEVIDFSSYIDVSTDPGHNAIFWEISGETNEDVLQDCCNCLDRAFIDAGYVSSRKCKTIGALELRVVAKGTFRKIQEHFLGLGSSAGQFKMPRCVKPSNAKVLQILCENVVSSYFSTAF

SEQ ID NO: 1296 - protein, 242 aa, Shigella dysenteriae
LKERKEGAFVPFVTLGDPGIEQSLKIIDTLIEAGADALELGIPFSDPLADGPTIQNATLRAFAAGVTPAQCFEMLALIRQKHPTIPIGLLMYANLVFNKGIDEFYAQCEKVGVDSVLVADVPVEESAPFRQAALRHNVAPIFICPPNADDDLLRQIASYGRGYTYLLSRAGVTGAENRAALPLNHLVAKLKEYNAAPPLQGFGISAPDHVKAAIDAGAAGAIFGSAIVKIIEQHINEPEKML

SEQ ID NO: 1297 - protein, 271 aa, Oryza sativa
MGALPRALVLGVCAAVLLVNVLAVAADGDAAAAASMVVGLAKCADCTRKNMKAEAVFKGVRVAIKCKNSNGEYETKATGEVGKSGAFAVPLAADLLGDDGELRQQCFAQLHSAASNQPCPGQEPSWIVNAAADKKKTFVAVAGDTHFPSSECASAFLCDPFHKKDFFFHYKNPSPPAPAAYHKPPPSYTHPAPPVYSYPTPAYSHPTPVYKQPLPTPSPPIYHPPAEEKKVAMQDDAEADPELFKKLLPLIKKNPFLKFPKLPPVEVEAKP

SEQ ID NO: 1298 - protein, 490 aa, Irvingia malayana
  unsure (1)..(490): unsure at all Xaa locations
INPXTSGSGVSXXXKKNPGRIVXXIXPXXDVAFPPGKMPNIYNALVVXGRDXXRQTINVXCEVQQLLGNNRVRAVAMSATDGLMRGMEVIDTGAXLSVPVGGATLGRIFNVLGEPVDDLGPVDTRATSPIHRSAPAFIQLDTKLSIFETGIKVVDLLAPYRRGGKIGLFGGAGVGKTVLIMELINNIAKAHGGVSVFGGVGERTREGNDLYMEMKESGVINEENIAESKVALVYGQMNEPPGARMRVGLTALTMAEYFRDVNEQDVLLFIDNIFRFVQAGSEVSALLGRMPSAVGYQPTLSTEMGSLQERITSTKEGSITSIQAVYVPADDLTDPAPATTFAHLDATTVLSRGLAAKGIYPAVDPLDSTSTMLQPQIVGEEHYETAQRVKQTLQRYKELQDIIAILGLDELSEEDRLTVARARKIERFLSQPFFVAEVFTGSPGKYVSLTETIRGFKLILSGELDSLPEQAFYLVGNIDEATAKGTXLEM

SEQ ID NO: 1299 - protein, 260 aa, Arabidopsis thaliana
MEGGTAHYSPRTVEEVFRDFKGRRAGIIQALTTDVEDFFQQCDPEKQNLCLYGFPNEVWEVNLPAEEVPPELPEPALGINFARDGMQERNWLSLVAVHSDAWLLSVSFYFGSRFGFDRADRKRLFSMINEVPTVYEVVTGNAEKQTKEMPSSANQNGNRSKSNSKMRGLESKSSKTIHAKDEEEGLELEEGEEEEDEDEDEHGETLCGACGDNYASDEFWICCDMCEKWFHGECVKITPARAEHIKHYKCPTCSNKRARP

SEQ ID NO: 1300 - protein, 470 aa, Pouteria obovata
EKKNLGRIIQIIGPVLDVAFPPGKMPNIYNALVVKGRDTVGKPINVTCEVQQLLGNNRVRAVAMSATDGLMRGMEVIDTGAPLSVPVGGATLGRIFNVLGEPIDNLGPVDTRTTSPIHRSAPAFIQLDTKLSIFETGIKVVDLLAPYRRGGKIGLFGGAGVGKTVLIMELINNIAKAHGGVSVFGGVGERTREGNDLYMEMKESGVINEQNIAESKVALVYGQMNEPPGARMRVGLTALTMAEYFRDVNEQDVLLFIDNIFRFVQAGSEVSALLGRMPSAVGYQPTLSTEMGSLQERITSTKEGSITSIQAVYVPADDLTDPAPATTFAHLDATTVLSRGLAAKGIYPAVDPLDSTSTMLQPRIVGEEHYETAQKVKQTLQRYKELQDIIAILGLDELSEEDRLTVARARKIERFLSQPFFVAEVFTGSPGKYVGLAETIRGFQLILSGELDGLPEQAFYLVGNIDEATA

SEQ ID NO: 1301 - protein, 269 aa, Geobacillus stearothermophilus
MLLLSVNPPLFIPFIVAGDPSPEVTVDLALALEEAGADLLELGVPYSDPLADGPTIQRAAARALAGNMTLPKAIHLVAEMRKKGVTIPIILFTYYNPVLQLGEESFFALARENGANGVLIPDLPFEESGPLRELGERFDLPLISLVAPTSKQRIERIASVAQGFLYCVSSLGVTGMRETLPESLGDFVSEVKRHSRVPVAVGFGISTPEQVAMLKEVCDGVVIGSALVQKVEQLGERLLAPEEKEAAIAEFAAYARSLAAPLHAPCSLR

SEQ ID NO: 1302 - protein, 1013 aa, Pyrococcus furiosus DSM 3638
MPAKGRIIRVTGPLVIADGMKGAKMYEVVRVGELGLIGEIIRLEGDKAVIQVYEETAGLKPGEPVEGTGSSLSVELGPGLLTSIYDGIQRPLEVLREKSGHFIARGISAPALPRDKKWHFTPKVKVGDKVVGGDIIGEVPETSIIVHKIMVPPGIEGEIVEIADEGEYTIEEVIAKVKTPSGEIKELKMYQRWPVRVKRPYKEKLPPEVPLVTGQRVIDTFFPQAKGGTAAIPGPFGSGKCVDGDTLILTKEFGLIKIKDLYEKLDGKGRKTVEGNEEWTELEEPITVYGYKNGKIVEIKATHVYKGASSGMIEIKTRTGRKIKVTPIHKLFTGRVTKDGLVLEEVMAMHIKPGDRIAVVKKIDGGEYVKLDTSSVTKIKVPEVLNEELAEFLGYVIGDGTLKPRTVAIYNNDESLLKRANFLAMKLFGVSGKIVQERTVKALLIHSKYLVDFLKKLGIPGNKKARTWKVPKELLLSPPSVVKAFINAYIACDGYYNKEKGEIEIVTASEEGAYGLTYLLAKLGIYATIRRKTINGREYYRVVISGKANLEKLGVKREARGYTSIDVVPVDVESIYEALGRPYSELKKEGIEIHNYLSGENMSYETFRKFAKVVGLEEIAENHLQHILFDEVVEVNYISEPQEVYDITTETHNFVGGNMPTLLHNTVTQHQLAKWSDAQVVVYIGCGERGNEMTDVLEEFPKLKDPNTGKPLMERTVLIANTSNMPVAAREASIYTGITIAEYFRDMGYDVALMADSTSRWAEALREISGRLEEMPGEEGYPAYLASRLAEFYERAGRVVTLGSDYRVGSVSVIGAVSPPGGDFSEPVVQNTLRVVKVFWALDADLARRRHFPAINWLTSYSLYVDAVQDWWHKNVDPEWRRMRDKAMELLQKEAELQEIVRIVGPDALPERERAILLVARMLREDYLQQDAFDEVDTYCPPQKQVTMMRVLMTFYERTMDAISRGVPLEEIAKLPVREEIGRMKFEPDIEKIRALIDKTNEQFDELLKKYGA

SEQ ID NO: 1303 - protein, 1109 aa, Ipomoea nil
MKVAVNTFLLFLCSTSSIYAAFALNSDGAALLSLTRHWTSIPSDITQSWNASDSTPCSWLGVECDRRQFVDTLNLSSYGISGEFGPEISHLKHLKKVVLSGNGFFGSIPSQLGNCSLLEHIDLSSNSFTGNIPDTLGALQNLRNLSLFFNSLIGPFPESLLSIPHLETVYFTGNGLNGSIPSNIGNMSELTTLWLDDNQFSGPVPSSLGNITTLQELYLNDNNLVGTLPVTLNNLENLVYLDVRNNSLVGAIPLDFVSCKQIDTISLSNNQFTGGLPPGLGNCTSLREFGAFSCALSGPIPSCFGQLTKLDTLYLAGNHFSGRIPPELGKCKSMIDLQLQQNQLEGEIPGELGMLSQLQYLHLYTNNLSGEVPLSIWKIQSLQSLQLYQNNLSGELPVDMTELKQLVSLALYENHFTGVIPQDLGANSSLEVLDLTRNMFTGHIPPNLCSQKKLKRLLLGYNYLEGSVPSDLGGCSTLERLILEENNLRGGLPDFVEKQNLLFFDLSGNNFTGPIPPSLGNLKNVTAIYLSSNQLSGSIPPELGSLVKLEHLNLSHNILKGILPSELSNCHKLSELDASHNLLNGSIPSTLGSLTELTKLSLGENSFSGGIPTSLFQSNKLLNLQLGGNLLAGDIPPVGALQALRSLNLSSNKLNGQLPIDLGKLKMLEELDVSHNNLSGTLRVLSTIQSLTFINISHNLFSGPVPPSLTKFLNSSPTSFSGNSDLCINCPADGLACPESSILRPCNMQSNTGKGGLSTLGIAMIVLGALLFIICLFLFSAFLFLHCKKSVQEIAISAQEGDGSLLNKVLEATENLNDKYVIGKGAHGTIYKATLSPDKVYAVKKLVFTGIKNGSVSMVREIETIGKVRHRNLIKLEEFWLRKEYGLILYTYMENGSLHDILHETNPPKPLDWSTRHNIAVGTAHGLAYLHFDCDPAIVHRDIKPMNILLDSDLEPHISDFGIAKLLDQSATSIPSNTVQGTIGYMAPENAFTTVKSRESDVYSYGVVLLELITRKKALDPSFNGETDIVGWVRSVWTQTGEIQKIVDPSLLDELIDSSVMEQVTEALSLALRCAEKEVDKRPTMRDVVKQLTRWSIRSYSSSVRNKSK

SEQ ID NO: 1304 - protein, 284 aa, Synechocystis sp. PCC 6803
MVLRQVMDFAQAVEHLLHPAVVSFNPHPRSFFSGRTQPLLTPLPEKAAQLTAIGIEQLVLLPFTEKLANLSPKQFVQSILVEQLQAKFISVGQDFCFGHQRRGNVQDLQNLGQEFGITVAIAQLEQTDTERISSSRIRRALKEGKLAMANHLLGRPYALRGTVVQGQQLGRKLGFPTANLCLPADKLWPKYGVYAGWVNLNALDVPIPAVINLGDRPTVNGQEPSAEVHLLQWSGDLYGQGLEVALTHYLRPETKFAGLDQLKNQIAQDCQQAEKLLNLDGAIP

SEQ ID NO: 1305 - protein, 469 aa, Listeria innocua
MTNLTLMNQLTPKQIVEKLDQYIIGQTGAKKSVAVALRNRYRRQLMDESIRDEIIPKNILMIGPTGVGKTEIARRIAKIVRAPFSKVEATKFTEVGYVGRDVESMVRDLVEVSVRLVKEEKMQLVRVKAEKNAEKRLIKLLAPSQKKKQTTSQNPLEALFGSMNQPDEPAEEEVDQELKNKRSQIEWRLQNGELDDEIVTVEVKEQQNPMFDMMRGTGMDQMSGMQDALSGMFPAKKKKRKVTVREAKKILFEDEASKLIDSDELAAEGIHRAEQMGMIFIDEIDKIASKEGGGNAQVSREGVQRDILPIVEGSQISTKYGTVNTEYILFIAAGAFHMSKPSDLIPELQGRFPIRIELDKLTQEDFYKILTEPDNALIKQYKALLKTEGIDLIFTKEAVERIAEIAFQVNQDSDNIGARRLHTILEKLLEDLLFEAPEINMESIKVTENYVNEKLAPIMTNKDLTQFIL

SEQ ID NO: 1306 - protein, 487 aa, Maripa repens
MRINPTTSGSEVSAVEKKNLGRIVQIIGPVLDVAFPPGKMPNIYNALVVQGRDNNVTCEVQQLLGNNRVRAVAMSDTDGLMRGMEVIDTGAPISVPVGGVTLGRIFNVLGKPVDNLGPVDTNTTSPIHRSAPAFIQLDTKLSIFETGIKVVDLLAPYRRGGKIGLFGGAGVGKTVLIMELINNIAKAHGGVSVFGGVGERTREGNDLYMEMKESGVINEENIAESKVALVYGQMNEPPGARMRVGLTALTMAEYFRDVYEQDVLLFIDNIFRFVQAGSEVSALLGRMPSAVGYQPTLSTEMGSLQERITSTKEGSITSIQAVYVPADDLTDPAPATTFAHLDATTVLSRGLAAKGIYPAVDPLDSTSTMLQPRIVSEEHYETAQRVKQTLQRYKELQDIIAILGLDELSEEDRLTVARARKIERFLSQPFFVAEVFTGSPGKYVGLAETIRGFQLILSGELDGLPEQAFYLVGNIDEATAKAMNLKT

SEQ ID NO: 1307 - protein, 279 aa, Brucella melitensis
MTTRIDTKFAELKAEGRPALVTYFMGGDPDLETALKVMKALPKAGADVIELGMPFSDPMADGPAIQAAGLRALNAGQTLAKTLYMAAEFRKEDDTTPIVMMGYYNLIYIYGVERFLTDAKASGVDGLIVVDLPSEMDAELCIPAMKAGINFIRLTTPTTDDKRLPKVLHNSSGFVYYVSMNGITGAAIADTAKVGEAVRHIKKSTDLPICVGFGVKTPEQAAAIATHADGVVVGTAIVNAIAGELDEKGKAKGDPVAAATRLVHALAESVRATRLEAAQ

SEQ ID NO: 1308 - protein, 248 aa, Lycopersicon esculentum
MDFQSDLTREISPQRKLGRGKIEIKRIENTTNRQVTFCKRRNGLLKKAYELSVLCDAEVALVVFSNRGRLYEYANNSVKATIERYKKACSDSSNTGSVSEANAQYYQQEASKLRAQIGNLMNQNRNMMGEALAGMKLKELKNLEQRIEKGISKIRSKKNELLFAEIEYMQKREVDLHNNNQYLRAKIAETERAQHQHQQMNLMPGSSSNYHELVPPPQQFDTRNYLQVNGLQTNNHYPRQDQPPIQLV

SEQ ID NO: 1309 - protein, 391 aa, unidentified bacterium
EFQTGDVLRISMDENLEGTKEKIAVTYAGLFDDVQVGGQVLFDDGLLGTTVLEKDVANRELVVRVDNDGILGSRKGVNAPGVSINLPGITEKDADDIRFGLDHGINYIAASFVRKPEDVLEIRGLLKEKNMEHVQIVPKIESQEGIDNLDAIIAVSDGLMVPRGDMGVEIPAENVPLVQKEMIRKMNLAGLPVITATQMLDSMEENPRPTRAEASDVANAVFDGTDATMLSGESANGEYPVEAVATMAAIDEKAESSLPYYGRHQDLHFDETDSTEAVASAVSRIAHSVNAKAIVVSTNSGYTACMVSKYRPEVNILAVTYSERVQRGLTLNYGVLPVVYEAPATIDEMIALAKTAVKEQGLANSGDTIVIAAGVPMSQSGTTNMITVQTV

SEQ ID NO: 1310 - protein, 270 aa, Thermobifida fusca
MTVLRRKLAEAKAEGRAALVGYYPAGFPDVASSIRVVQAMVAGGCDVIEVGFPYSDPTMDGPVIQQAADRALAAGTTPKDVLAVVRAVADAGAAALVMSYWNPIEKYGVDAFAADLAAAGGSGLITPDLIPEEAEPWIKASDAAGIDRIFLVAPSSTDERLAKTCAASRGFVYAASLMGVTGTRDKVAATARRLVERTRAVTRDSGLPICVGLGISNGAQAAEVASYADGVIVGTGFCQRVLDAPDVDTACQQVRDFAAELAAGVRAAAR

SEQ ID NO: 1311 - protein, 480 aa, Koeberlinia spinosa
EKKNLGRIAQIIGPVLDVVFPPSNMPNIYNALVVKGRDTVGQQINVTCEVQQLLGNNRVRAVAMSATDGLMRGMEVIDTGAPLSVPVGGATLGRIFNVLGEPVDNLGPVDTRTTSPIHKSAPAFIQLDTKLSIFETGIKVVDLLAPYRRGGKIGLFGGAGVGKTVLIMELINNIAKAHGGVSVFGGVGERTREGNDLYMEMKESGVINEQNLAESKVALVYGQMNEPPGARMRVGLTALTMAEYFRDVNEQDVLLFIDNIFRFVQAGSEVSALLGRMPSAVGYQPTLSTEMGSLQERITSTKKGSITSIQAVYVPADDLTDPAPATTFAHLDATTVLSRGLAAKGIYPAVDPLDSTSTMLQPRIVGEEHYETAQQVKQTLQRYKELQDIIAILGLDELSEEDRLTVARARKIERFLSQPFFVAEVFTGSPGKYVGLAETIRGFKLILSGELDSLPEQAFYLVGNIDEATAKATNLEMESK

SEQ ID NO: 1312 - protein, 591 aa, Streptococcus pyogenes M1 GAS
MNQGKIITVSGPLVVASGMQEANIQDICRVGHLGLVGEIIEMRRDQASIQVYEETSGIGPGEPVVTTGCPLSVELGPGLISEMFDGIQRPLDRFQKATDSDFLIRGVAIPSLDRKAKWAFIPKLSVGQEVVAGDILGTVQETAVIEHRIMVPYKVSGTLVAIHAGDFTVTDTVYEIKQEDGSIYQGSLMQTWPVRQSRPVAQKLIPVEPLVTGQRVIDTFFPVTKGGAAAVPGPFGAGKTVVQHQIAKFANVDIVIYVGCGERGNEMTDVLNEFPELIDPNTGQSIMERTVLIANTSNMPVAAREASIYTGITIAEYFRDMGYSVAIMADSTSRWAEALREMSGRLQEMPGDEGYPAYLGSRIAEYYERAGRVRTLGSQEREGTITAIGAVSPPGGDISEPVTQNTLRIVKVFWGLDAPLAQRRHFPAINWLTSYSLYQDDVGSYIDRKQQSNWSNKVTRAMAILQREASLEEIVRLVGLDSLSEQDRLTMAVARQIREDYLQQNAFDSVDTFTSFPKQEAMLTNILTFNEEASKALSLGAYFNEIMEGTAQVRDRIARSKFIPEENLEQIKGLTQKVTKEIHHVLAKGGI

SEQ ID NO: 1313 - protein, 494 aa, Phytolacca americana
PTTSGPGVSTLEKKNLGRIAQIIGPVLDVAFPPGKMPNIYNALVVKGRDTAGQPINVTCEVQQLLGNNRVRAVAMSATDGLTRGMEVIDTGGPLSVPVGGATLGRIFNVLGEPVDNLGPVDTRTTSPIHRSAPAFTQLDTKLSIFETGIKVVDLLAPYRRGGKIGLFGGAGVGKTVLIMELINNIAKAHGGVSVFGGVGERTREGNDLYMEMKESGVINEQNIAESKVALVYGQMNEPPGARMRVGLTALTMAEYFRDVNEQDVLLFIDNIFRFVQAGSEVSALLGRMPSAVGYQPTLSTEMGSLQERITSTKEGSITSIQAVYVPADDLTDPAPATTFGHLDATTVLSRGLAAKGIYPAVDPLDSTSTMLQPRIVGEEHYETAQRVKQTLQRYKELQDIIAILGLDELSEEDRLTVARARKIERFLSQPFFVAEVFTGSPGKYVGLAETIRGFQLILSGELDGLPEQAFYLVGNIDEATAKAMNLEMESKLKK

SEQ ID NO: 1314 - protein, 482 aa, Deinococcus radiodurans
MKHFDRATKIVATVGPASRSTEVLGRMIDVGLNVVRLNFSHGDLEDHRQTVQMVRDLAVSKGVTIGILQDLQGPKIRVGRFAEGSVTLNPGQKFVITMDEVEGNAERVGSTYKGLAGDVTPGMTLLLDDGNMSLRVDHVRGNDIQTTVLIGGTLKNNKGINVPEADLTVPALSEKDVQDMEFGASLGVDWVALSFVRSRDDLLLARHYLARFGSRAKLMAKIEKPQAVDRFADILKEVDGVMVARGDLGVEMRPEQVPTIQKRIIRMCREAGKPVITATQMLESMINLPRPTRAEASDVANAIYDGTDAVMLSAESAAGQYPVESVAMMDRIAREAEASELYQLMQRQVVMDTEQAQDAIALAACNIGAKLEAPAIVTFTSTGGAATRISKNRPPLAIVALTPNEITRNQLALSWGVYPMLSEDPEDTDDMVRIANDELKKSGLADVGDRYVITAGVPFGVRGTTNMLRVEKLKAEDLSDRV

SEQ ID NO: 1315 - protein, 1017 aa, Pyrococcus abyssi
MVAKGRIIRVTGPLVVADGMKGAKMYEVVRVGELGLIGEIIRLEGDKAVIQVYEETAGVRPGEPVIGTGSSLSVELGPGLLTSIYDGIQRPLEVIREKTGDFIARGVTAPALPRDKKWHFIPKVKVGDKVVGGDIIGEVPETSIITHKIMVPPGIEGEIVEIAEEGEYTIEEVIAKVKTPSGEIKELKMYQRWPVRVKRPYKEKLPPEVPLITGQRVIDTFFPQAKGGTAAIPGPFGSGKCVDGDTLVLTKEFGLIKIKDLYKILDGKGKKTVNGNEEWTELERPITLYGYKDGKIVEIKATHVYKGFSAGMIEIRTRTGRKIKVTPIHKLFTGRVTKNGLEIREVMAKDLKKGDRIIVAKKIDGGERVKLNIRVEQKRGKKIRIPDVLDEKLAEFLGYLIADGTLKPRTVAIYNNDESLLRRANELANELFNIEGKIVKGRTVKALLIHSKALVEFFSKLGVPRNKKARTWKVPKELLISEPEVVKAFIKAYIMCDGYYDENKGEIEIVTASEEAAYGFSYLLAKLGIYAIIREKIIGDKVYYRVVISGESNLEKLGIERVGRGYTSYDIVPVEVEELYNALGRPYAELKRAGIEIHNYLSGENMSYEMFRKFAKFVGMEEIAENHLTHVLFDEIVEIRYISEGQEVYDVTTETHNFIGGNMPTLLHNTVTQHQLAKWSDAQVVIYIGCGERGNEMTDVLEEFPKLKDPKTGKPLMERTVLIANTSNMPVAAREASIYTGITIAEYFRDMGYDVALMADSTSRWAEALREISGRLEEMPGEEGYPAYLASKLAEFYERAGRVVTLGSDYRVGSVSVIGAVSPPGGDFSEPVVQNTLRVVKVFWALDADLARRRHFPAINWLTSYSLYVDAVKDWWHKNVDPEWKAMRDKAMELLQKESELQEIVRIVGPDALPERERAILLVARMLREDYLQQDAFDEVDTYCPPEKQVTMMRVLLNFYDKTMEAISRGVPLEEIAKLPVREEIGRMKFEPDVGKIKALIDKTNEQFEELFKKYGA

SEQ ID NO: 1316 - protein, 314 aa, Desulfitobacterium hafniense
YEYLLHLNEYLEDNGCETEYLGEFQEIDSEGVAVTGSSERTGSDKSLEQLLQELNELIGLARVKKDLNSLVNLIKVQKIREERGFSQPAMSLHLVFSGNPGTGKTTVARLLAEIYKALGLVSKGQLIETDRSGLVAGYVGQTALKTQEVISKAKGGILFIDEAYSLTENRGEADFGTEAIDTLVKAMEDNRADLVIIVAGYPEPMERFLDSNPGLRSRFNKFISFDDYSAEELLLILKSMCKKTNLSLSSQAEAYAYSFFQKRCDSDTFANARDVRNFFEKALVNQADRLAHIEDLSDEMLFAIEYDDIKDMTC

SEQ ID NO: 1317 - protein, 463 aa, Thermotoga maritima
MKSFDEMTPKEIVQELDKYIVGQYEAKKAVAIAVRNRIRRQKLPEEWRKEVLPKNILMIGPTGVGKTEIARRLAQLSGSPFLKVEATRFTEVGYVGKNVDSMIRDLVEISVNMVKQEKIKEVERQAEELVEERILDALVPESKAMPVVTNPFINLITGGQQQQYTPEDRRRFRAKREEMREKLRKGELEDEEIEIELEETVSPFMGIFGPGMEDLGIEITNMFSGMLPKRKKKRKMKVSEARKVLLPLEAEKLIDMDKVVQEALDRAQNRGIIFIDEIDKIAGKESAVGPDVSRQGVQRDLLPIVEGTTIMTKYGPVRTDFILFIAAGAFHVSRPSDLIPELQGRFPIRVELSPLTEEDFVRILKEPENAIIKQYQALLSTEGVELVFTEDGIREMARIAYQLNQRLENIGARRLYTVAEKVLEEISFEAPDIPEKRVVVDAEYVRRRLEKIVQDEDLSAYIL

SEQ ID NO: 1318 - protein, 185 aa, Glycine max
MASSDPISSRHYTYNRKQKSLGLLCTNFLSLYNRDTVHLIGLDDAATRLGVERRRIYDIVNVLESIGVLSRKAKNQYTWRGFAAIPLTLQDLKEEGLKENSNSLRGPGNHDKVSDDEDDEETQSNPAATGSQSDKLNPNSTLPKPLKNENRREKSLALLTQNFVKLFVCSNVELISLDEAAKLLL

SEQ ID NO: 1319 - protein, 475 aa, Corynebacterium glutamicum ATCC 13032
MDRRTKIVCTLGPAVASADGILRLVEDGMDVARLNFSHGDHPDHEQNYKWVREAAEKTGRAVGILADLQGPKIRLGRFTDGATVWENGETIRITVDDVEGTHDRVSTTYKNLAKDAKPGDRLLVDDGKVGLVCVSVEGNDVICEVVEGGPVSNNKGVSLPGMDISVPALSEKDIRDLRFALKLGVDFIALSFVRSPADAELVHKIMDEEGRRVPVIAKLEKPEAVTSLEPIVLAFDAVMVARGDLGVEVPLEEVPLVQKRAIQIARENAKPVIVATQMLDSMIENSRPTRAEASDVANAVLDGADAVMLSGETSVGKDPHNVVRTMSRIVRFAETDGRVPDLTHIPRTKRGVISYSARDIAERLNARALVAFTTSGDTAKRVARLHSHLPLLVFTPNEAVRSELALTWGATTFLCPPVSDTDDMMREVDRALLAMPEYNKGDMMVVVAGSPPGVTGNTNMIHVHLLGDDTRIAKL

SEQ ID NO: 1320 - protein, 456 aa, Rhus copallina
IGPVLDVAFPPGKMPNIYNALVVKGRDTVGQPINVTCEVQQLLGNNRVRAVAMSATDGLTRGMEVINTGAPLSVPVGGATLGQIFNVLGEPVDNLGPVDTRTTSPIHKSAPAFIQLDTKLSIFETGIKVVDLLAPYRRGGKIGLFGGAGVGKTVLIMELINNIAKAHGGVSVFGGVGERTREGNDLYMEMKESGVINEQNIAESKVALVYGQMNEPPGARMRVGLTALTMAEYFRDVNEQDVLLFIDNIFRFVQAGSEVSALLGRMPSAVGYQPTLSTEMGSLQERITSTKEGSITSIQAVYVPADDLTDPAPATTFAHLDATTVLSRGLAAKGIYPAVDPLDSTSTMLQPRIVGEEHYETAQRVKQTLQRYKELQDIIAILGLDELSEEDRLTVARARKIERFLSQPFFVAEVFTGSPGKYVGLAETIRGFKLILSGELDGLPEQAFYLVGNIDE

SEQ ID NO: 1321 - protein, 490 aa, Hydnocarpus heterophylla
  unsure (1)..(490): unsure at all Xaa locations
XXSGVSXLEKKNSGRIAQIIGPVLDVAFPPGKMPNIYNALVVKGRDTIGQQINVTCEVQQLLGNNRVRAVAMSATDGLMRGMEVIDTGAPLSVPVGGATLGRIFNVLGEPVDDLGPVDTRATSPIHRSAPAFIQLDTKLSIFETGIKVVDLLAPYRRGGKIGLFGGAGVGKTVLIMELINNIAKAHGGVSVFGGVGERTREGNDLYMEMKESGVINEENIAESKVALVYGQMNEPPGARMRVGLTALTMAEYFRDVNEQDVLLFIDNIFRFVQAGSEVSALLGRMPSAVGYQPTLSTEMGSLQERITSTKEGSITSIQAVYVPADDLTDPAPATTFAHLDATTVLSRGLAAKGIYPAVDPLDSTSTMLQPQIVGEEHYETAQRVKQTLQRYKELQDIIAILGLDELSEEDRLTVARARKIERFLSQPFFVAEVFTGSPGKYVGLAETIRGFKLILSGELDSLPEQAFYLVGNIDEATAKATNLETENXLK

SEQ ID NO: 1322 - protein, 269 aa, Triticum aestivum
MADGKRSVAETFSRLRERGKTAFIPFITAGDPDLATTSKALRILDSCGSNVIELGVPYSDPLADGPVIQAAASRALKKGTKLGSVLAMLTEVIPELSCPIVLFTYYNPILKNGVRNFMAKIKQAGVHGLVVPDLPLEETTLLRSEATMHNIELVLLTTPTTPTERMKEITKASEGFVYLVSAVGVTGARSNVNLRVEHLLKEIKQVTDKPVAVGFGISTPEHAKQIAGWGADGVIIGSAIVRQLGEAASPEEGLRRIEEYAKSIKAAIP

SEQ ID NO: 1323 - protein, 436 aa, Glycine max
MYVVPPPQRSDPGSGSGDLRVYQAWKGSNKFFLQGRFIFGPDARSLALTIFLIAAPVAVFCVYVARKLIDDFSDHLGVTIMAIAVIFTIYVLVLLLLTSGRDPGIIPRNAHPPEPEGFEGSLDVGAGQTPQLRLPRIKEVEVNGITVKVKYCDTCMLYRPPRCSHCSICNNCVERFDHHCPWVGQCIGLRNYRFFFMFVFSTTLLCIYVFAFCWVYIVRIMASEETTIWKAMIKTPASIVLIIYTFISMWFVGGLTAFHLYLISTNQTTYENFRYRYDRRANPYNKGVLNNFKEIFCISIPLSKNNFRAMVPREPALPTRSVGGGCGNQNMRKAGEDIEMSRKTVWDMGAGIDDTEAQINNERVTIKDGELSPEIRTTVDDSDRAGMHPRRSSWGRKSGSWEMSPEVLALAARVGEPNRVGGGGSSSSLAHENRHV

SEQ ID NO: 1324 - protein, 344 aa, Oryza sativa
MRSCTSLTKNINSDRTNSLDWSTFSISCQSVSMMIGSSVHWRAIILGLRAQPPLTFFWSQTTIHFRALITFLRGTATLDLIWAPAPAAIDSPAPPARLAQKEPSSLPLSTRMPLSARRQESQRLPAPTLPHWPTGWRAAACALPEGHYSKPAHTPPSARRPLPPRVFWIDLICVVGVLLAEKSRHRHRRSEGRRRRPPPPPPSSSPPAAMAFGDRITTFEDSEKESEYGYVRKVSGPVVVADGMGGAAMYELVRVGHDNLIGEIIGLEGDSATIQVYEETAGLMVNDPVLRTRKRPLKTIAIKSGDVYIPRGVSVPALDKDALWHFKPEKLGVGDIITGGDLYA

SEQ ID NO: 1325 - protein, 440 aa, Pseudomonas aeruginosa PAO1
MPAPLSPLIVRMRHAIEGCRPIQIRGRVTQVTGTLLKAVVPGVRIGELCQLRNPDQSLALLAEVIGFQQHQALLTPLGEMLGVSSNTEVSPTGGMHRVAVGEHLLGQVLDGLGRPFDGSPPAEPAAWYPVYRDAPQPMSRRLIERPLSLGVRAIDGLLTCGEGQRMGIFAAAGGGKSTLLASLVRNAEVDVTVLALVGERGREVREFIESDLGEQGLRRSVLVVATSDRPAMERAKAGFVATSIAEYFRDQGRRVLLLMDSLTRFARAQREIGLAAGEPPTRRGYPPSVFAALPRLMERAGQSERGSITALYTVLVEGDDMSEPVADETRSILDGHIVLSRKLAAANHYPAIDVLHSVSRVMNQIVDDDQRHAAGRLREWLAKYEEVELLLKIGEYQKGQDSEADRAIEKIGAIRQWLRQGTHETSDYAQACAQLRSLCA

SEQ ID NO: 1326 - protein, 426 aa, Corynebacterium efficiens YS-314
MARMQESADLLKCSFCGKSQKQVKKLIAGGAVYICDECIELCNEIIEEELGQAQGQEEEHGELPKPSEISAFLDKYVVGQDQAKRILSVAVYNHYKRLRAHEQIGGRRRRDEEDTELIKSNILLLGPTGSGKTYLAQTLAKLLDVPFAIADATSLTEAGYVGEDVENILLKLLQAADFDVERAQRGIIYIDEVDKISRKSENPSITRDVSGEGVQQALLKILEGTVAAIPPQGGRKHPNQDFIQLDTTNILFIVAGAFSGLEKIIGERRGKKGLGFGVEVASKKDEEKEDIFKDVRPEDLVKFGLIPEFIGRLPVVATVANLDQESLVKVLTEPRNSLVKQYKRLFEMDDTLLTFTDDALEAIADLALERKTGARGLRAILEEILVPIMYDIPDRDDVTEVVITGEVARGEAEPELITHTAEEKTA

SEQ ID NO: 1327 - protein, 410 aa, Streptococcus mutans UA159
MAGNRTNDVTVHCSFCGKNQDEVKKIIAGNGVFICNECVELSQEIIREELAEEVLADLSEVPKPKELLAILDSYVIGQDRAKRALAVAVYNHYKRISFTESQDDQDVDLQKSNILMIGPTGSGKTFLAQTLAKSLNVPFAIADATALTEAGYVGEDVENILLKLIQAADYNVERAERGIIYVDEIDKIAKKGENVSITRDVSGEGVQQALLKIIEGTVASVPPQGGRKHPQQEMIQIDTKNILFIVGGAFDGIEDIVKQRLGEKIIGFGQNNKKIDDQSSYMQEIISEDIQKFGLIPEFIGRLPVLAALEQLTVDDLVKILTEPKNALVKQYQTLLSYDGVELEFDQEALQAIAQKAIERKTGARGLRSIIEETMLDLMFEIPSQEDVTCVRITKKAVEGTDKPILETAS

SEQ ID NO: 1328 - protein, 464 aa, Lactobacillus leichmannii
MREKTPKQIVDLLDKYIVGQNEAKKSVAIALYNRYRRAQLPEDVQKDITPKNILMAGPTGVGKTEIARRLADIVDAPFVKVEATKFTEVGYVGRDVESMVRDLANEAVRIVEKEEFVKVEGQAIRQANKTLVRLLVPGVKRNNRQNQMQQMQEMIQSLLAGGGMSEETEEVTDEIRNQRLSVAEKLDRGLLENEEVTIEVEQAPKANPMGDMMGQMGMDMSSMLGDMLPKKKVKRTLPVSQARKLLVQEEEKKLVNYDDIYQKAMDRAGQSGIIFIDEIDKITAADKRNSAGVSREGVQRDILPIVEGSTVSTKYGPLSTDHILFIAAGAFAESKPSDLIPELQGRFPIRVELDALTKDDFVRILKDPQNSLLKQYIALLKADGVDLVFTAEAVDKIAEIAFEVNQGTDNIGARRLATILEKLLEEVLYEGPDMEMGQITITQAYVEQKLSDIVKNKDLTKFIL

SEQ ID NO: 1329 - protein, 450 aa, Triticum aestivum
  unsure (1)..(450): unsure at all Xaa locations
MGALPRGLLVLGVCAVLVAAVLADASPASSMVVGLAKCADCTRKNMKAEAAFAGLQVAVKCKNAHGEYETKAIGTVDKSGAFGVPLGADLLREDGELKQDCFAQLHSAPDHPCPGQEPSMIVRQSADGAEKKSFVAVPGEVHYSSQECASAFLCHFFHKKHLFHKKSALVVPHLKKKAIVIPHIHKKPIVIPHFHKKPAPVPVPEYKPPTPTPVYTHPKPVPEIQAXPTPVYPHPAPIYHPPAADQKAALNPETDPQLFKKLLHKKPIVIPHLPIVIPHFHKKPAPVPVPEYKPPTPTPVYTAPDAGARVQATDSGVPAPVADLPPSCRRSEGSRRANYPTRVAKAIQEKSCNALLLKVNQIGSVTESIEAVKMSKHAGWGVMTSHRSGETEDTFIADLAVGLSTGQIKTGAPCRSERLAKYNQLLRIEEELGDAAVYAGLKFRAPVEPY

SEQ ID NO: 1330 - protein, 483 aa, Lithodora diffusa
  unsure (1)..(483): unsure at all Xaa locations
GSGVSMLEKNNLGRVVQIIGPVLDVAFSPGKMPNIYNALVVQGRDTVGQPINVTCEVQQLLGNNRVRAVAMSATDGLTRGMEVIDTGAALSVPVGGATLGRIFNVLGEPVDNLGPVDTRTTSPIHRSAPAFIQLDTKLSIFETGIKVVDLLAPYRRGGKIGLFGGAGVGKTVLIMELINNIAKAHGGVSVFGGVGERTREGNDLYMEMKESGVINEENIAESKVALVYGQMNEPPGARMRVGLTALTMAEYFRDVNEQDVLLFIDNIFRFVQAGSEVSALLGRMPSAVGYQPTLSTEMGTLQERITSTKAGSITSIQAVYVPADDLTDPAPATTFAHLDATTVLSRGLAAKGIYPAVDPLDSTSTMLQPRIVGEEHYETAQRVKETLQRYKELQDIIAILGLDELSEEDRLTVARARKIERFLSQPFFVAEVFTGSPGKYVGLAETIRGFQLILSGELDGLPEQAFYLVGNIDEATAKXMNLE

SEQ ID NO: 1331 - protein, 599 aa, Physcomitrella patens
MALRIENPYYKLLDTDEEIVEDFELMSRNARETQLELLRKILERNANVEYLQRQGLNGRTDEASFKACVPVSTYANIEADVDRIADGDTSPICCVDPPTSFALSSGTTGGKCKLIPRTDALLAQAMKAGQIGSVYRRRAFPRKHEGPPVVMSFQYAGRQFDTKSGLKAGTGTTNFYRSAAFKNAKSAPFSATSPVDIVLGYDVPQQMYCHLLCGLYRCQEVEQMSAIFAYMIVEPFRLLERVWRDICKDIREGTVNERVSDPELRSSVLKVLSPNPELADLIERECAKGWSGIIERLFPNINYIMSIFSGSMLPYVAPMRQYAGSVPLMNADYGASEAWIGINLDPRCPAEDASFTIIPNFAYFEFIPVNRDSAGYDSVEGDEIVGLTDVKVGQEYEIVLTTVGGLYRYRLGDIVKVTGFFNSTPKVAFVCRKGVVLSVNTDKTDEEELRLVVGKASLLLKESNMELADYSSYTDQDSQPGHYVIFWELRSHEHLDMDLLSECCKVLDQSFNNPYMRGRAARTIGPLELAIVKEGAFARLMEQFVRKNGVGASQYKVSRCFKNPATLKHFRDETIATLRSPDFPPELLAAWRPSTKIVG

SEQ ID NO: 1332 - protein, 159 aa, Glycine max
  unsure (1)..(159): unsure at all Xaa locations
YRLIPMXKSEDKDXGLQALEQIMSXVMDSGKIVEXVDGHCEAMNXVIASNEGFCMWEGKFFRFNDLVLXELEQILQIKMYNLDEDSLLYGLMVHLDCXIRALLVLIERDQPLKLGIEANVGVVETMLVNDRENLELRMSFGCMDSEELISIRLVDLVAG

SEQ ID NO: 1333 - protein, 249 aa, Rosa rugosa
MEFPKQITPADDPESSSQKKLGRGKIEIKRIENTTNRQVTFCKRRNGLLKKAYELSVLCDAEVALIVFSTRGRLYEYANNSVRATIERYKKACDSSNTGSVTETNVQFYQQEASKLRRQIREIQNSNRHILGEALSTLNVKELKNLEGRLEKGISRIRSKKNEMLFAEIEYMQKREIELQNHNNFLRAKIAENDRAQQQQANMMPGTLSAYDQSMPPPQSYDRSFLPVILESNHHYNRQGQNQTPLQLV

SEQ ID NO: 1334 - protein, 242 aa, Betula pendula
MEFQNQSMSVSPQRKLGRGKIEIKRIENTTNRQVTFCKRRNGLLKKAYELSVLCDAEIALIVFSSRGRLYEYANNSSVKTTIERYKKACAESSNSGSVSEANTQFYQQEAAKLRGQIRSVQNSNRHLLGEALSELNFKELKNLEIKLEKGINKIRSKKNELLFAEIEYMQKREAELHNNNQILRAKIAENERNQQNLNVMPGGGNYELMQSQSYDSRTYFQVDALQPNHHYPRQDQIPLQLV

SEQ ID NO: 1335 - protein, 470 aa, Yersinia pestis CO92
MKKTKIVCTIGPKTESEEMLTNLLNAGMNVMRLNFSHGDYAEHGQRIKNLRAVMAKTGKKAAILLDTKGPEIRTMKLEGGKDAALVAGQTFTFTTDQSVVGNDKIVAVTYPGFAADLKIGNTVLVDDGLIGMEVIEVTEHTVVCKVLNSGDLGENKGVNLPGVSIQLPALAEKDKGDLIFGCEQGVDFVAASFIRKRSDVLEIREHLKAHGGEHIQIISKIENQEGLNNFDEILEASDGIMVARGDLGVEIPVEEVIFAQKMMIEKCNRARKVVITATQMLDSMIKNPRPTRAEAGDVANAILDGTDAVMLSGESAKGKYPLESVTIMATICERTDRVMPSRIESLNDNRKMRITEAVCRGAVETAEKLEAKVIVVATGGGKSAKSVRKYFPTATILALTTNEMTAHQLILTKGVITQLVDEIASTDDFYRLGKEAALASGLAQKGDVVIMVSGALVPSGTTNTSSVHVL

SEQ ID NO: 1336 - protein, 453 aa, Thesium humile
PNIYNALVVKGRDTVVQPIIMACEVQQLLGNNRVRAVAMSATDGLMRGMEVIDTEAPLSVPVGEATLGRIFNVLGEPIDNLGPIDTRTTSPIHRSAPAFIQLDTKFSIFETGIKVVDLLAPYRRGGKIGLFGGAGVGKTVLIMELINNIAKAHGGVSVFGGVGERTREGNDLYMEMKESGVINDQNIAESKVALVYGQMNEPPGARMRVGLTALTMAEYFRDINEQDVLLFIDNIFRFVQAGSEVSALLGRMPSAVGYQPTLSTEMGSLQERITSTKEGSITSIQAVYVPADDLTDPAPATTFAHLDATTVLSRGLAAKGIYPAVDPLDSTSTMLQPRIVGEEHYETAQKVKQTLQRYKELQDIIAILGLDELSEEDRLTVARARKIERFLSQPFFVAEVFTGSPGKYVGLTETIRGFQLILSGELDSLTEQAFYLVGNIDEATEKAMNLEME

SEQ ID NO: 1337 - protein, 458 aa, Clarkia xantiana
  unsure (1)..(458): unsure at all Xaa locations
GRIAQIIGPVLDVAFPPGKMPNIYNALVVKGRDTVGQEINVTCEVQQLLGNNRVRAVAMSATDGLTRGMEVIDTGAPLSVPVGGATLGRIFNVLGEPVDELGPVDTRTTSPIHRSAPAFIQLDTKLSIFETGIKVVDLLAPYRRGGKIGLFGGAGVGKTVLIMELINNIAKAHGGVSVFGGVGERTREGNDLYMEMKESGVINEQNIAESKVALVYGQMNEPPGARMRVGLTALTMAEYFRDVNKQDVLLFIDNIFRFVQAGSEVSALLGRMPSAVGYQPTLSTEMGSLQERITSTKEGSITSIQAVYVPADDLTDPAPATTFAHLDATTVLSRGLAAKGIYPAVDPLDSTSTMLQPRIVGDEHYETAQRVKETLQRYKELQDIISILGLDELSEEDRLTVARARKIERFLSQPFFVAEVFTGSPGKYVGLAETIRGFKLILSGXXDGLPEQAFYLVG

SEQ ID NO: 1338 - protein, 483 aa, Lavandula bipinnata
TTSGSGVSTLEKKNLGRIIQIIGPVLDVAFPPGQMPNIYNALVVKGRDTVGQPINVTCEVQQLLGNNRVRAVAMSATDGLMRGMEVIDTGAPLSVPVGGATLGRIFNVLGEPVDNLGPVDTRTTFPIHRSAPAFIQLDTKLSIFETGIKVVDLLAPYRRGGKIGLFGGAGVGKTVLIMELINNIAKAHGGVSVFGGVGERTREGNDLYMEMKESGVINEENIAESKVALVYGQMNEPPGARMRVGLTALTMAEYFRDVNEQDVLLFIDNIFRFVQAGSEVSALLGRMPSAVGYQPTLSTEMGSLQERITSTKEGSITSIQAVYVPADDLTDPAPATTFAHLDATTVLSRGLAAKGIYPAVDPLDSTSTMLQPRIVGEEHYETAQRVKQTLQRYKELQDIIAILGLDELSEEDRLTVARARKIERFLSQPFFVAEVFTGSPGKYVGLAETIKGFQLILSGELDGLPEQAFYLVGNIDEATAKGY

SEQ ID NO: 1339 - protein, 366 aa, Lepuropetalon spathulatum
VDTRTTSPIHRSAPAFIQLDTKLSIFETGIKVVDLLAPYRRGGKIGLFGGAGVGKTVLIMELINNIAKAHGGVSVFGGVGERTREGNDLYMEMKESGVINEQNIAESKVALVYGQMNEPPGARMRVGLTALTMAEYFRDVNEQDVLLFIDNIFRFVQAGSEVSALLGRMPSAVGYQPTLSTEMGSLQERITSTKKGSITSIQAVYVPADDLTDPAPATTFAHLDATTVLSRGLAAKGIYPAVDPLDSTSTMLQPRIVGEEHYETAQRVKQTLQRYKELQDIIAILGLDELSEEDRLTVARARKIERFLSQPFFVAEVFTGSPGKYVGLAETIRGFKLILSGELDGLPEQAFYLVGNIDEATAKATN

SEQ ID NO: 1340 - protein, 605 aa, Aspergillus oryzae
MAPSGKGSQDEAHHGAVFSVSGPVVVAENMIGCAMYELCRVGKDQLVGEVIRLDGDKATIQVYEETDGVTVGDPVERTGKPLAVELGPGFMETIYDGIQCPLKAIFHQSKGIYIPRGITVNALDREKKWDFTPGQYKVGDHITGGDVWGSVFENSLLNDHKILLPPRARGTITRIAEAGSYTVEEKLLEIEFNGKKSEFGMMQTWAVRVPDQSTIGSIDAPFIVGQRVLDSLFPSVQGGTVCIPGAFGCGKTVISQSVSKSSNSDIIVYVGCGERGNEMAEVLMDFPELSIEIDGRKEPIMKRTCLIANTSNMPVAAREASIYTGITIAEYFRDQGKNVAMMADSSSRWAEALRELSGRLGEMPADQGFPAYLGAKLASFYERAGKSVALGSPERIGSVSIVGAVSPPGGDFSDPVTTSTLGIVQVFWGLDKKLAQRKHFPSINTSMSYSKYTTVLDKFYEKNYPEFPRLRDQIRELLTKSEELDQVVQLVGKAALGDSDKIALDVAAMVKDDFLQQNGYSDYDQFCPLWKTEYMMKAFMGYHDEAQKAIAQGQNWAKVREPLPTSRLPCGTYSCEVPENQQEVSEKYEKVLQTMSERFASVSDE

SEQ ID NO: 1341 - protein, 426 aa, Vibrio vulnificus CMCP6
MTDKSKESGSGKLLYCSFCGKSQHEVRKLIAGPSVYICDECVDLCNDIIREEIKDVLPKRESEALPTPREIRAHLDDYVIGQDHAKKVLAVAVYNHYKRLRNGDTTSDGVELGKSNILLIGPTGSGKTLLAETLARFLDVPFTMADATTLTEAGYVGEDVENIIQKLLQKCDYDVAKAERGIVYIDEIDKISRKAENPSITRDVSGEGVQQALLKLVEGTIASVPPQGGRKHPQQEFLQVDTSKILFICGGAFAGLDKVIEQRVATGTGIGFGAEVRSKDESKTVGELFTQVEPEDLVKYGLIPEFIGRLPVTASLTELDEEALIQILCQPKNALTKQYAALFELEGADLEFREDALKAIAKKAMERKTGARGLRSILEGVLLETMYELPSMDDVSKVVIDESVINGESEPLLIYTNSDSQAAGAE

SEQ ID NO: 1342 - protein, 310 aa, Bradyrhizobium japonicum
MLDVPHATTAEGGETNFDLRKEAEAAGITDTLQQLEQELVGLRPVKNRVRQIASLLLIERIRQRAGLASAPPTLHMSFTGNPGTGKTTVALRMAKILHGLGFVRRGQVISVTRDDLVGQYIGHTAPKTKEILKKAMGGVLFIDEAYYLHRPDNERDYGQEAIEILLQVMENQREDLVVILAGYGERMTSFFASNPGFRSRIAHHVEFPDYAEAELLVIAELMLKERGYRFSATAREAFERYIALRRTQPLFSNARSIRNAVDRMRLRQADRLVCDLDRVLDISDLETIDPVDVLASRVFSGGADVRSAKP

SEQ ID NO: 1343 - protein, 247 aa, Petunia integrifolia subsp. inflata
MVFPNQEFESSSSQRKSGRGKIEIKRIENTTNRQVTFCKRRNGLLKKAYELSVLCDAEVALIVFSSRGRLYEYANNSVRATIDRYKKHHADSTSTGSVSEANTQYYQQEAAKLRRQIRDIQTYNRQIVGEALSSLSPRDLKNLEGKLEKAIGRVRSKKNELLFSEIELMQKREIEMQNANMYLRAKIAEVERATQQMNLMPGGGSEYQQQPMSSTSQPYDARNFLPVNLLEPNPHYSRQDQTALQLV

SEQ ID NO: 1344 - protein, 535 aa, Oryza sativa (japonica cultivar-group)
MALNLAQSAAAAACFATAGDARRAASVVAMPSSSSSATTSLRMKRQAACEPVACRAVARHVAAAAASSRRNGVPVFVMMPLDTVSKCGSALNRRKAVAASLAALKSAGVEGIMVDVWWGIVESEGPGRYNFDGYVELMEMARKTGLKVQAVMSFHQCGGNVGDSVNIPLPRWVVEEMEKDNDLAYTDQWGRRNFEYISLGCDAMPVFKGRTPVECYTDFMRAFRDHFASFLGDTIVEIQVGMGPAGELRYPSYPESNGTWRFPGIGAFQCNDRYMRSSLKAAAEARGKPEWGHGGPTDAGGYNNWPEDTVFFRGDCGGWSTEYGEFFLSWYSQMLLEHGERVLSGATSVFGDGAGAKISVKVAGIHWHYGTRSHAPELTAGYYNTRHRDGYLPIARMLARHGAVLNFTCVEMRDHEQPQEAQCMPEALVRQVAAAARAAGVGLAGENALPRYDGTAHDQVVAAAADRAAEDRMVAFTYLRMGPDLFHPDNWRRFVAFVRRMSESGSPREAAESAAHGVAQATGSLVHEAAVALRS

SEQ ID NO: 1345 - protein, 413 aa, Oenococcus oeni
MQPTLACSFCGKRQDQVKKLIAGPGVYICDECVALAQHIIDQELEHEQQALVLDDLPTPIELVKHLNEYVIGQEEAKKIFSGRCYNHEKRVNESLQHKSDVELQKSNILLIGPTGSGKTYLAQSLAKMLDVPFAIADATTLTEAGYVGEDVENVVLKLLQAADFDVEKAQRGIIYIDEIDKIAKKSENVSITRDVSGEGVQQSLLKLLEGTISSVPPQGGRKHPQQEYIQVDTSNILFIVGGAFDGIEDVIRDRLGESMIGFGHEDQQEKQHFNKKNPLTQLTDQDVIKFGLIPEFLGRLPIISILNPLYEDDLVKILTKPKNALVKQYKALLALDGVQLVFDPKALKEMAKIAIDKKSGARGLRSNYGIDYERKMYEIPSKPDVAKVLVTKAAVDGKAQPKIISISKKALAS

SEQ ID NO: 1346 - protein, 487 aa, Persoonia katerae
NPTTSGPGVSALEEKNLGRIAQIIGPVLDVAFPPGKMPNIYNALVVKGRDTVGQQINVTCEVQQLLGNNRVRAVAMSATDGLMRGMEVIDTGAPLSVPVGGATLGRIFNVLGEPVDNLGPVDTRTTSPIHRSAPAFIQLDTKLSIFETGIKVVDLLAPYRRGGKIGLFGGAGVGKTVLIMELINNIAKAHGGVSVFGGVGERTREGNDLYMEMKESGVINEQNIAESKVALVYGQMNEPPGARMRVGLTALTMAEYFRDVNEQDVLLFIDNIFRFVQAGSEVSALLGRMPSAVGYQPTLSTEMGSLQERITSTKEGSITSIQAVYVPADDLTDPAPATTFAHLDATTVLSRGLAAKGIYPAVDPLDSTSTMLQPRIVGEEHYETAQRVKQTLQRYKELQDIIAILGLDELSEEDRLTVARARKIERFLSQPFFVAEVFTGSPGKYVGLAETIRGFQLILSGELDGLPEQAFYLVGNIDEATAKAMNL

SEQ ID NO: 1347 - protein, 586 aa, Sporosarcina psychrophila
MRKTKIVCTIGPASESPELLEQLIEAGMNVARLNFSHGNHAEHKARIDSIRKVAREKGKVVGILLDTKGPEIRTHSMMNGKLELVTGQKIDISMTQVEGNNDVFSVSYDKLIEDVNEGSVILLDDGLIQLEVTGKDVARGLIHTLIINSGSLSNNKGVNIPGVSVQLPGMTEKDAEDILFGIREGVDFIAASFVRRASDVMEIRALLENNNGSNLQIIPKIENQEGVDNIDEILNVSDGLMVARGDLGVEIPPEEVPLVQKNLIEKCNQAGKPVITATQMLDSMQRNPRPTRAEASDVANAIFDGTDAIMLSGETAAGIYPVESVQTMDRIALTTEAAIDYRSVVSTRRREKHGNMTEAIGQAAAYTAINLKVKAVLAPTESGHTAKMIAKYRPGCPVIAVTSSEMCSRKLSLIWGVYPIVGKKASSIDEILQESVEESVKHQYVGHGDVVIITAGVPVGEAGTTNLMKIHVIGDLLARGQGIGKDVAYGRTVVAKNAAEALAYDTEGAILVTNASDRDMMPAIEKCAGLITEEGGLTSHGAIVGLSLGIPIIVGVENATELIQHGKEITMDAESGVIYNGHASVL

SEQ ID NO: 1348 - protein, 353 aa, Azotobacter vinelandii
MLRRLVQVPEVRAADPAGADRGGGAVAAHRADRRRLVPLPARHRRAGRDLPDPRSACRLAAGGGLRRGAPGRDFPGAGGGVRARDPGFRSLRRRLPPAARTPALARRARHARTDDGGIEASNMDMQYAIFDMDGLLIDSEPLWMSTQAALLHELYGIAPGTQDLHAWKGVSSRAFCEDMARLHAGRGVEAGTLFEALIARMGRAIVEAPLMPGAVELIAWLRERHVGLAIASSSPLPFIAAVVRRHALPIAVFASGTEVPRSKPHPAVFELAAERLGAQRHQCRVWEDSLNGVIAARAAGMPVVAVPDPAHPGAERFAIADRVHRTLHESLAELNAADPGTPTIKSPNHVQPA

SEQ ID NO: 1349 - protein, 589 aa, Treponema pallidum
MTQTKGIVSAVNGNMVSVTFEGVVSLNEVGYVHVGNARLKAEIIRVRGREAQLQVFEITRGVSVGDRVEFTGDLLSVELGPGLLGQVYDGLQNPLPLLAEKVGYFLERGVYLPALSRTSEWMFTPHVSVGERVVRGDVLGYTPEGALKHRIMVPFHMGDSYEVVFIQTAGTYRVHDVIARVRDAQGHEHELTMAFRWPVKRPVHCYAERLKPTEPLVTSIRTIDTFFPVAKGGTYCIPGPFGAGKTVLQHSTSRNADVDVVVIAACGERAGEVVETLREFPDLTDPRTGRSLMERTVIVCNTSSMPVASREASVYTGVTLAEYYRQMGLDVLLLADSTSRWAQALREMSGRLEEIPGEEAFPAYLESCIAAFYERAGVVRLRSGEKGSVTIGGTVSPAGGNFEEPVTQATLKVVGAFHGLSRERSDARRYPAVHPLDSWSKYPSVLDARAVAYGRSFLRRGAEVEQMMRVVGEEGTSMEDFLVYLKGSFLDSVYLQQNSFDTVDSAVPVARQKHCYAIVMRVLGSVLAFESKDDARAYFSKLGHMFIDYNCCAWNSEAFVEKEKEIRAFLQGESTKIDSEAEGIIRGME

SEQ ID NO: 1350 - protein, 350 aa, Arabidopsis thaliana
MKPVFCGNFEYDAREGDLERLFRKYGKVERVDMKAGFAFVYMEDERDAEDAIRALDRFEFGRKGRRLRVEWTKSERGGDKRSGGGSRRSSSSMRPSKTLFVINFDADNTRTRDLEKHFEPYGKIVNVRIRRNFAFIQYEAQEDATRALDASNNSKLMDKVISVEYAVKDDDARGNGHSPERRRDRSPERRRRSPSPYKRERGSPDYGRGASPVAAYRKERTSPDYGRRRSPSPYKKSRRGSPEYGRDRRGNDSPRRRERVASPTKYSRSPNNKRERMSPNHSPFKKESPRNGVGEVESPIERRERSRSSPENGQVESPGSIGRRDSDGGYDGAESPMQKSRSPRSPPADE

SEQ ID NO: 1351 - protein, 220 aa, Bacillus subtilis subsp. subtilis str. 168
MIKALIFDFDGLILDTETHEYEVLQEIFEEHGSVLPLSVWGKVIGTAAGFRPFEYLEEQIGKKLNHEELTQLRRERFAKRMESEKARPGVEAYLNAAKDLGLKIGLASSSDYKWVSGHLKQIGLFDDFEVIQTADDVEEVKPNPELYLLAAKNLGVSPAECLAFEDSVNGSIAAKRAGMKCVIVPNKVTGTLMFEDYDHRLESMAEMELALLLDHLNSQN

SEQ ID NO: 1352 - protein, 269 aa, Buchnera aphidicola (Schlechtendalia chinensis)
MNRYQTLQKKLVPFKKGCFIPFIILGDPSIEMSLKIIDVLIENGADGLELGFPFSDPLSDGKTIQKAHLRAFSSKMNIYLCFEMLQKIRKKYNTIPIGLLLYANLIFKFGINNFYLKCFNVGIDSVLIADLPVEESNDFRKCAIANNISSVFVCPHDAKKNVIKKISLYSTGYIYLLSRSGVTGTDKKIIVPSLNLIKNLKKITEKLLIQGFGISNSKQIQKIILSGISGVICGSVIIKLIENHFQNEKKMLKNIKRLSRSLKQSTIIF

SEQ ID NO: 1353 - protein, 316 aa, Hevea brasiliensis
QVGVCYGMQGNNLPPVSEVIALYKKSNITRMRIYDPNRAVLEALRGSNIELILGVPNSDLQSLTNPSNAKSWVQKNVRGFWSSVLFRYIAVGNEISPVNRGTAWLAQFVLPAMRNIHDAIRSAGLQDQIKVSTAIDLTLVGNSYPPSAGAFRDDVRSYLNPIIRFLSSIRSPLLANIYPYFTYAGNPRDISLPYALFTSPSVVVWDGQRGYKNLFDATLDVLYSALERASGGSLEVVVSESGWPSAGAFAATFDNGRTYLSNLIQHVKRGTPKRPNRAIETYLFAMFDENKKQPEVEKQFGLFFPDKWQKYNLNFG

SEQ ID NO: 1354 - protein, 243 aa, Cyanidioschyzon merolae
MLIAYLTAGAPDINTTKEAVMKLAKKGADVIEIGVPYSDALADGAILQKASKQALMNGFHLDHLWNLLSEVNEIEVPLVILAYYNQIWHYGVEKWVKKLVAHNVKGLIVPDLPYEESKTLRQICDRYGLNIIWLISPTTNKTRAQELARACKDWIYVISRTGVTGLETEFDKQIPKLIGELKKVTKAPIALGFGISKSEQVKLVKSWGADGVIIGSACMQILLEKGVDQLSEWISVMKKSFCP

SEQ ID NO: 1355 - protein, 420 aa, Lactobacillus gasseri
MQQDITPKNMLMAGPTGVGKTEIARRLAKIVDAPFVKVEATKFTEVGYVGRDVESMVRDLVEEAVRMEEKEQFDRVKLQATKKANNRLVKLIVPGIKRENRENSMQQMMQMLSGNFNMNQAQDNEEVTDDIRNERLSVADQLNKGLLENREVTIEVEQAPKVNPMGDMMGQMGIDMSSLMGDLMPKKTVKRTLKVSDAREVLIQEESKKLINYDSLYQRAIERTQQNGIIFIDEIDKITAGNKKTSGEVSREGVQRDILPIVEGSTVSTKYGPVSTDHILFIAAGAFAESKPSDLIPELQGRFPIRVELNALTQEDFVKILKDPQNSLLKQYIALLKADGIKLVFTQEAIDRIAQIAFEVNQGTDNIGARRLATILEKLLEDVLYEGPDMNMGEITITQKYVDQKLSDIIINKDLTKFIL

SEQ ID NO: 1356 - protein, 428 aa, Streptomyces avermitilis MA-4680
MARIGDGGDLLKCSFCGKSQKQVKKLIAGPGVYICDECIDLCNEIIEEELAETSEVRWEELPKPREIYEFLEGYVVGQEAAKKALSVAVYNHYKRVQAGENGGGQSREDAIELAKSNILLLGPTGSGKTLLAQTLARMLNVPFAIADATALTEAGYVGEDVENILLKLIQAADYDVKKAETGIIYIDEIDKVARKSENPSITRDVSGEGVQQALLKILEGTTASVPPQGGRKHPHQEFIQIDTTNVLFIVGGAFAGLEKLIESRAGAKGIGFGATIRSKRELESKDQFEDVMPEDLVKFGMIPEFIGRLPVITSVHNLDREALLQILVEPRNALVKQYQRLFELDGVELDFEREALEAIADQAILRQTGARGLRAIMEEVLMSVMYEVPSRKDVARVVITADVVHSNVNPTLIPRDARGRGPGEQKTA

SEQ ID NO: 1357 - protein, 318 aa, Bacillus anthracis str. A2012
  unsure (1)..(318): unsure at all Xaa locations
MEQSMRKKNNNQINIVXNHRKKISLPAAENKTVISSXTTTKHEMLQRIEEEMGKLVGMDDIKKIIKEIYAWIYVNKKRQEIGLKSEKQVLHMLFKGNPGTGKTTVARMIGKLLFEMNILSKGHLVEAERADLVGEYIGHTAQKTRDLIKKAMGGILFIDEAYSLARGGEKDFGKEAIDTLVKHMEDKQHGFVLILAGYSREMNHFLSLNPGLQSRFPFIIEFADYSVNQLLEIGKRMYEEREYQLSKEAEWKFRDHLHAVKYSSQITSFSNGRYVRNIVEKSIRTQAMRLLQEDAYDKYDLVGISSSDLMLEEETHST

SEQ ID NO: 1358 - protein, 131 aa, Triticum aestivum
  unsure (1)..(131): unsure at all Xaa locations
SWTRVLSLGSDPYFVFPVIQASVARVLLAGVTTVAVMSMLKEVTPELSCPVVIFFYFNLIARRXTGSFTGVCREAGVRGLIVPDLPYIETGFLRNEAIKNDIELVLFTTPFTKADMINEISIALEGFVYLC

SEQ ID NO: 1359 - protein, 467 aa, Staphylococcus aureus subsp. aureus MW2
MDTAGIRLTPKEIVSKLNEYIVGQNDAKRKVAIALRNRYRRSLLDEESKQEISPKNILMIGPTGVGKTEIARRMAKVVGAPFIKVEATKFTEVGYVGRDVESMVRDLVDVSVRLVKAQKKSLVQDEATAKANEKLVKLLVPSMKKKASQTNNPLESLFGGAIPNFGQNNEDEEEPPTEEIKTKRSEIKRQLEEGKLEKEKVRIKVEQDPGALGMLGTNQNQQMQEMMNQLMPKKKVEREVAVETARKILADSYADELIDQESANQEALELAEQMGIIFIDEIDKVATNNHNSGQDVSRQGVQRDILPILEGSVIQTKYGTVNTEHMLFIGAGAFHVSKPSDLIPELQGRFPIRVELDSLSVEDFVRILTEPKLSLIKQYEALLQTEEVTVNFTDEAITRLAEIAYQVNQDTDNIGARRLHTILEKMLEDLSFEAPSMPNAVVDITPQYVDDKLKSISTNKDLSAFIL

SEQ ID NO: 1360 - protein, 608 aa, Saccharomyces castellii
ISQSLSKYSNSDSIIYVGCFAKGTEVLMADGSDKAIEAIEVGEQVMGKDGAPRTVIALPRGTETMYEVCHTTQHRNGNEKFGLMNYVCSGNHKLVLRTPQLIRTTIHELRGKHYTSVTFFVTEKSANGTIVKQRTKTFQHEFHGGEEAATKLAADFASTIDPKHIDWDIEAKDYKQLDHYVKKSSYQMINPVFKESGNLANILGDAGIEKTLAAKMAWLLGFWVGNGHMETAQFPVDSWDTQLVDRISEYGKHFNLTTTTENHYRSNHVESNKDIEIFEMNEAQIEEAEQTGVVAFDSNRKGDPSETELIEAEIFNESRPSTAGLFTPAAISPASLVTDLSVTLRGTGIGGAGVSKERNLNNIFWDIVTSFGVRTNGQGSTYEKSVPLHLSYDDIEVREQFIAGLIDSDGYVKSADNRFSATVTTIYKGVSEGLIRLARSLGIRVSVSTEKEHVDKNNVKHKSCYRVFLSGEALIGVLRFCALDRKRTAFKEFTREAVPFYFTLQEKDQDEYYGITLPDETDKQYLLSSLALVHNCGERGNEMAEVLMEFPELFTEKDGRKEPIMKRTTLVANTSNMPVAAREASIYTGITLAEYFRDQGKDVSMIAD

SEQ ID NO: 1361 - protein, 479 aa, Vandenboschia davallioides
  unsure (1)..(479): unsure at all Xaa locations
EKNVGQITQIIGPVLDVAFSPGKMPNIYNSLLIKGQNPAGQEINVTCEVQQLLGNNEVRAVAMSATDGLMRGMNVVDTGAPLSVPVGEITLGXIFNVLGDPVDNLGPVDTSTTFPIHRSAPAFTQLDTKLSIFETGIKVVDLLAPYRRGGKIGLFGGAGVGKTVLIMELINNIAKAHGGVSVFGGVGERTREGNDLYMEMKESKVINEQNISESKVALVYGQMNEPPGARMRVGLTALTMAEYFRDVNKQDVLLFIDNIFRFVQAGSEVSALLGRMPSAVGYQPTLGTEMGTLQERITSTKEGSITSIQAVYVPADDLTDPAPATTFAHLDATTVLSRGLAAKGIYPAVDPLDSTSTMLQPWIVGEEHYETAQGVKQTLQRYKELQDIIAILGLDELSEEDRLTVARARKIERFLSQPFFVAEVFTGSPGKYVSLIETIKGFQMILSGELDNLPEQAFYLVGNIDEATTKAVSLQVEGQ

SEQ ID NO: 1362 - protein, 487 aa, Coris monspeliensis
MRINPTTSASGASVLEKKNLGRIIQIIGPVLDVSFPPGKMPNIYNALVVKGRDTAGQPINVTCEVQQLLGNNRVRAVAMSATDGLTRGMEVIDTGAALSVPVGGVTLGRIFNVLGEPVDNLGPVDTRTTSPIHRSAPAFIQLDTKLSIFETGIKVVDLLAPYRRGGKIGLFGGAGVGKTVLIMELINNIAKAHGGVSVFGGVGERTREGNDLHMEMKESGVINEENIAESKVALVYGQMNEPPGARMRVGLTALTMAEYFRDVNEQDVLLFIDNIFRFVQAGSEVSALLGRMPSAVGYQPTLSTEMGSLQERITSTKEGSITSIQAVYVPADDLTDPAPATTFAHLDATTVLSRGLAAKGIYPAVDPLDSTSTMLQPRIVGEEHYETAQRVKQTLQRYKELQDIIAILGLDELSEEDRLTVARARKIERFLSQPFFVAEVFTGSPGKYVGLAETIRGFQLILSGELDGLPEQAFYLVGNIDEATAKA

SEQ ID NO: 1363 - protein, 342 aa, Gossypium hirsutum
MRNAIMHSTMLLLLSGLLLAIFKTTGAEVGVCYGMKANDLPPAAEVIDLFKQKGIKRMRLYDPNPDALQALGGTNIELLLDLPSANLESVAASQANADQWVEDNIKKYNTVNFRYIAVGNEVKPTDSFAQSLFPAMQNIRTAIVNAGLGDQIKVSTATFFAAIDKSSFPPSKGSLDPEYQKLLGQVITFLRDNQAPLLVNTYPYFSHIGDPEHVPLDYALFTAPSAVVQDGSLQYQYLFDAMLDTFYSALEKAGGVSVDIVVSETGWPSDGGQATSVDNAMTYNTKLVQHVNQGKGTPKKPEKAIVAYLFAMFDENEKEPAYEKHWGLFFPKKQEKYSISFN

SEQ ID NO: 1364 - protein, 308 aa, Rhodopseudomonas palustris
MDATATTPNGDDAPPARVDLRAEFNEVGIGEVLDQLDRELIGLKPVKTRIREIAALLLVERLRKRMGLATGNPTLHMSFTGNPGTGKTTVALRIASILHKLGFVRRGHVVSVTRDELVGQYIGHTAPKTKEVLKKAMGGVLFIDEAYYLYRPENERDYGQEAIEILLQVMENQRDDLVVILAGYADRMEKFFQSNPGFRSRIAHHIDFPDYTDGELLTIAEGMLSEQNYHFAPEAKAAFERYIGIRKTQPLFANARSIRNALDRIRLRQANRLIADLDRSLSAEDLMTIEAGDVLASRVFGKEDGRDR

SEQ ID NO: 1365 - protein, 439 aa, Aster tripolium
MKILLGVGINGGLFGSCVSSRSKVDSSTSGISSHFEIKSTNNVSKDQPTTSNSEHNLPTLTPEDELKVASRLRKFGFNDLKMATRNFRPESLLGEGGFGCVFKGWIEENGTAPVKPGTGLTVAVKTLNHDGLQGHKEWLAEVNFLGDLGNPNLVKLIGYCIEDDQRLLVYEFLPRGSLENHLFRRSLPLPWSIRMKIALGAAKGLAFLHEEAKRPVIYRDFKTSNILLDAEYNAKLSDFGLAKDGPEGDKTHISTRVMGTYGYAAPEYVMTGHLSSKSDVYSFGVVLLEMLTGRRSMDKKRPNGEHNLVEWARPHLGERRRFYRLIDPRLEGHFSIKGAQKAAQLASRCLSRDPKARPLMSEVVDCLKPLPALKDMAGPSYYLQTVQPERAGSSPDPNRTRVGSFSRNGSQHPRTLSIPNASPRHNQFLQDSPNPNGKQ

SEQ ID NO: 1366 - protein, 93 aa, Cicer arietinum
RCQNGKPPRCHHCSICQRCVLKMDHHCIWVVNCVGARNYKYFLLFLLYTFLETTLDCLALIPSFIRFFGGTKYRHPLTPGGFAAIFLASNCVA

SEQ ID NO: 1367 - protein, 546 aa, Torulaspora pretoriensis
ISQSLSKYSNSDAIIYVGCFAKGTKVLLHDGSLRAIESIEVGEDVMGVDGERRKVVGLPRGREVMYKVSQKTTNRAHETAETRSEPLGLFEYTCNATHKLVVRTPRSCRLLTRNENGADYYDVAFFDLVKTKLKDGREIEIVKEMSNSYLATEGPEKAAQMVKEYQEASEGKEFFEWTIEARDVAVLGADVREATYQVYSPVLYESDFFSQYVKDSKFGLTSEAPLALAYLLGLWAGDVSSEETVFSVNSEDGSLYERITQFADILGLSAEFKDREAPKQGKTVYLHPKAIGGNDIQENSNNDNPLRNAIVDLGYLTDGVKNVPTYLLSDAIPHREIFLAGLIDSDGFVRSEDGCSATIKTTLKTVMAGTVAVARSLGLNVSVNTEEAKVDNGVDQRLSYAISISVSDALLSVLAKCAGAEMFRELPASEVVRKMNKVYFEMEELEEDDYYGLTLANGTDHQFMLANQLVVHNCGERGNEMAEVLMEFPELHTEKNGKMEPIMKRTTLVANTSNMPVAAREASIYTGITLAEYFRDQGRDVAMIAD

SEQ ID NO: 1368 - protein, 487 aa, Colona floribunda
  unsure (1)..(487): unsure at all Xaa locations
SGXSTLEKEXLGRISQIIGPVLDVAFPPGKMPNIYNALVVKGRDTVGQQINVTCEVQQLLGNNRVRAVAMSATDGLMRGMEVIDTGAPLSVPVGGATLGRIFNVLGEPVDNLGPVDTRTTSPIHKPAPAFIQLDTKLSIFETGIKVVDLLAPYRRGGKIGLFGGAGVGKTVLIMELINNIAKAHGGVSVFGGVGERTREGNDLYMEMKESGVINEQNLAESKVALVYGQMNEPPGARMRVGLTALTMAEYFRDVNEQDVLLFIDNIFRFVQAGSEVSALLGRMPSAVGYQPTLSTEMGTLQERITSTKEGSITSIQAVYVPADDLTDPAPATTFAHLDATTVLSRGLAAKGIYPAVDPLDSTSTMLQPRIVGEEHYETAQRVKQTLQRYKELQDIIAILGLDELSEEDRLTVARARKIERFLSQPFFVAEVFTGSPGKYVGLAETIRGFKLILSGELDGLPEQAFYLVGNIDEATAKATNLEMESKL

SEQ ID NO: 1369 - protein, 424 aa, Brucella melitensis 16M
MSKVSNGGGDSKNTLYCSFCGKSQHEVRKLIAGPTVFICDECVELCMDIIREENKSSMVKSREGVPTPQEIMAVLDDYVIGQKDAKRVLSVAVHNHYKRLAHQSKNSDIELAKSNILLVGPTGCGKTYLAQTLARIIDVPFIMADATTLTEAGYVGEDVENIILKLLQAADYNVERAQRGIVYIDEVDKISRKSDNPSITRDVSGEGVQQALLKIMEGTVASVPPQGGRKHPQQEFLQVDTTNILFICGGAFAGLDRIISARGEKTSIGFGATVKSVDERRIGEVFKELEPEDLLKFGLIPEFVGRLPVIATLEDLDVDALVQILTEPKNALVKQYQRLFDMENVELVFHDDALRAIANKAVERKTGARGLRSIMEKILLDTMFELPTLEGVREVVISGDVVDGSARPLYIYAERQDEKGNVSA

SEQ ID NO: 1370 - protein, 439 aa, Arabidopsis thaliana
MAALLLLFLFLFASSALSQDSLIGVNIGTEVTNMPSPTQVVALLKSQNINRVRLYDADRSMLLAFAHTGVQVIISVPNDQLLGISQSNATAANWVTRNVAAYYPATNITTIAVGSEVLTSLTNAASVLVSALKYIQAALVTANLDRQIKVSTPHSSTIILDSFPPSQAFFNKTWDPVIVPLLKFLQSTGSPLLLNVYPYFDYVQSNGVIPLDYALFQPLQANKEAVDANTLLHYTNVFDAIVDAAYFAMSYLNFTNIPIVVTESGWPSKGGPSEHDATVENANTYNSNLIQHVINKTGTPKHPGTAVTTYIYELYNEDTRPGPVSEKNWGLFYTNGTPVYTLRLAGAGAILANDTTNQTFCIAKEKVDRKMLQAALDWACGPGKVDCSALMQGESCYEPDDVVAHSTYAFNAYYQKMGKASGSCDFKGVATVTTTDPSM

SEQ ID NO: 1371 - protein, 623 aa, Arabidopsis thaliana
MPAFYGGKLTTFEDDEKESEYGYVRKVSGPVVVADGMAGAAMYELVRVGHDNLIGEIIRLEGDSATIQVYEETAGLTVNDPVLRTHKPLSVELGPGILGNIFDGIQRPLKTIARISGDVYIPRGVSVPALDKDCLWEFQPNKFVEGDTITGGDLYATVFENTLMNHLVALPPDAMGKITYIAPAGQYSLKDTVIELEFQGIKKSYTMLQSWPVRTPRPVASKLAADTPLLTGQRVLDALFPSVLGGTCAIPGAFGCGKTVISQALSKYSNSDAVVYVGCGERGNEMAEVLMDFPQLTMTLPDGREESVMKRTTLVANTSNMPVAAREASIYTGITIAEYFRDMGYNVSMMADSTSRWAEALREISGRLAEMPADSGYPAYLAARLASFYERAGKVKCLGGPERNGSVTIVGAVSPPGGDFSDPVTSATLSIVQVFWGLDKKLAQRKHFPSVNWLISYSKYSTALESFYEKFDPDFINIRTKAREVLQREDDLNEIVQLVGKDALAEGDKITLETAKLLREDYLAQNAFTPYDKFCPFYKSVWMMRNIIHFYNLANQAVERAAGMDGQKITYTLIKHRLGDLFYRLVSQKFEDPAEGEDTLVEKFKKLYDDLNAGFRALEDETR

SEQ ID NO: 1372 - protein, 224 aa, Streptococcus pneumoniae
MPKTLTKKLNAIKAAGKGIFVPYIMAGDHEKGLDGLAETIHFLEDLGVSAIEVGIPFSDPVADGPVIEEAGLRSLAHGTSTQALVETLKTIETEIPLVIMTYFNPLFQYGVENFVKDLADTAVKGLIIPDLPHEHANFVEPFLADTDIALIPLVSLTTGIERQKELIEGAEGFVYAVAINGVTGKSGNYRADLDKHLAQLHQVADIPVLTGFGVSSQVDLERFN

SEQ ID NO: 1373 - protein, 323 aa, Arabidopsis thaliana
MVGLDDAASKLGVERRRIYDIVNVLESVGVLTRRAKNQYTWKGFSAIPGALKELQEEGVKDTFHRFYVNENVKGSDDEDDDEESSQPHSSSQTDSSKPGSLPQSSDPSKIDNRREKSLGLLTQNFIKLFICSEAIRIISLDDAAKLLLGDAHNTSIMRTKVRRLYDIANVLSSMNLIEKTHTLDSRKPAFKWLGYNGEPTFTLSSDLLQLESRKRAFGTDITNVNVKRSKSSSSSQENATERRLKMKKHSTPESSYNKSFDVHESRHGSRGGYHFGPFAPGTGTYPTAGLEDNSRRAFDVENLDSDYRPSYQNQGAYILFTSI

SEQ ID NO: 1374 - protein, 248 aa, Nicotiana tabacum
MDFQSDLTREISPQRKLGRGKIEIKRIENTTNRQVTFCKRRNGLLKKAYELSVLCDAEVALIVFSSRGRLYEYANNSVKATIERYKKACSDSSNTGSISEANAQYYQQEASKLRAQIGNLQNQNRNMLGESLAALSLRDLKNLEQKIEKGISKIRSKKNELLFAEIEYMQKREIDLHNNNQYLRAKIAETERAQQQQQQQQMNLMPGSSSYELVPPPHQFDTRNYLQVNGLQTNNHYTRQDQPSLQLV

SEQ ID NO: 1375 - protein, 109 aa, Mycoplasma genitalium
KASDGIMVARGDLGLEIPYYQVPYWQRYMIKACRFFNKRSITATQMLDSLEKNIQPTRAEVTDVYFAVDRGNDATMLSGETASGLYPLNAVAVMQKIDKQSETFFDYQY

SEQ ID NO: 1376 - protein, 533 aa, Zygosaccharomyces bisporus
PNSDAIIYVGCFAKGTEVMMSDASVKTVESVKVGEQVMGKDGKPRKVVATPSGCEKMYKVTQKVAHKRTHTLNEPRGLSEYTCNATHKLVVRTPRICRSVIRKFKGTNYIDVIFFNKVKGSVEDGRVIDIVQEASMSYPAVEGPERALRAIKEYAEADGAREFFEWTIEARDISLLDENVRAATYQLRAPVLLQNDFFSQYVSNSKFASGTEATRALSYFLGLWIGGGLTDKTTLSVDSEDTSLFDRINQFAEILGLSAEQEAKEESKRAKKVNLHPKTNGAEDADRSLNIGNPLWNAIVDLEYLKDGSKNVPAYLSSDCFENREMFLAGLVDSEGHVRGEVATINTCHHSVMTGVVAVARSLGITVTVNTKGEKFGNIGANQDSGYVIQLSSCDALLSVLANCGAVDKRREAPAHGVIRELNKVYFEMRELGEDEYYGLTLSNDSDHQFLLANQLVVHNCGERGNEMAEALMEFPELFTEKNGSKEPIMKRTTLVANTSNMPVAAREASIYTGITLAEYFRDQGKDISMIAD

SEQ ID NO: 1377 - protein, 423 aa, Bradyrhizobium japonicum USDA 110
MSKVGTSDSKNTLYCSFCGKSQHEVRKLIAGPTVFICDECVELCMDIIREENKSSLVKSRDGIPTPKEICKVLDDYVIGQSHAKKVLSVAVHNHYKRLNHQTKHNDVELAKSNILLIGPTGSGKTLLAQTLARILDVPFTMADATTLTEAGYVGEDVENIILKLLQAADYNVERAQRGIVYIDEIDKISRKSDNPSITRDVSGEGVQQALLKIMEGTVASVPPQGGRKHPQQEFLQVDTTNILFICGGAFAGLEKIISARGRSTSIGFGAQVLAPEDRRTGEIFRHVEPEDLLKYGLIPEFVGRLPVVATLEDLDETSLKKILTEPKNALVKQYQRLFEMENIELTFADEALGAVARKAIERKTGARGLRSILEAILLETMFDLPGLEGVEEVVISREVVEGTARPLYIYADRSDRAVENASA

SEQ ID NO: 1378 - protein, 418 aa, Arabidopsis thaliana
MPHPTQVVALLKAQEIRHIRLYNADPGLLIALANTGIKVIISIPNDQLLGIGQSNSTAANWVKRNVIAHYPATMITAVSVGSEVLTSLSNAAPVLVSAIKNVHAALLSANLDKLIKVSTPLSTSLILDPFPPSQAFFNRSLNAVIVPLLSFLQSTNSYLMVNVYPYIDYMQSNGVIPLDYALFKPIPPNKEAVDANTLVRYSNAFDAMVDATYFAMAFLNFTNIPVLVTESGWPSKGETNEPDATLDNANTYNSNLIRHVLNKTGTPKRPGIAVSTYIYELYNEDTKAGLSEKNWGLFNANGEPVYVLRLTNSGSVLANDTTNQTYCTAREGADTKMLQAALDWACGPGKIDCSPIKQGETCYEPDNVVAHANYAFDTYYHQTGNNPDACNFNGVASITTTDPSKKHKKPFLIIHCIV

SEQ ID NO: 1379 - protein, 493 aa, Eucryphia cordifolia
TTSGPGVSALEKKNLGRIAQIIGPVLDVAFPPGKMPNIYNALVVKGRDTVGQQINVTCEVQQLLGNNRVRAVAMSATDGLMRGMEVIDTGAPLSVPVGGATLGRIFNVLGEPIDNLGPVDTRTTSPIHRSAPAFIQLDTKLSIFETGIKVVDLLAPYRRGGKIGLFGGAGVGKTVLIMELINNIAKAHGGVSVFGGVGERTREGNDLYMEMKESGVINEENIAESKVALVYGQMNEPPGARMRVGLTALTMAEYFRDVNEQDVLLFIDNIFRFVQAGSEVSALLGRMPSAVGYQPTLSTEMGSLQERITSTKEGSITSIQAVYVPADDLTDPAPATTFAHLDATTVLSRGLAAKGIYPAVDPLDSTSTMLQPRIVGEEHYETAQRVKQTLQRYKELQDIIAILGLDELSEEDRLTVARARKIERFLSQPFFVAEVFTGSPGKYVGLAETIRGFKLILSGELDGLPEQAFYLVGNIDEATAKATNLETENKLKK

SEQ ID NO: 1380 - protein, 613 aa, Mycobacterium tuberculosis CDC1551
MVAASPVASRVNGKVDADVVGRFATCCRALGIAVYQRKRPPDLAAARSGFAALTRVAHDQCDAWTGLAAAGDQSIGVLEAASRTATTAGVLQRQVELADNALGFLYDTGLYLRFRATGPDDFHLAYAAALASTGGPEEFAKANHVVSGITERRAGWRAARWLAVVINYRAERWSDVVKLLTPMVNDPDLDEAFSHAAKITLGTALARLGMFAPALSYLEEPDGPVAVAAVDGALAKALVLRAHVDEESASEVLQDLYAAHPENEQVEQALSDTSFGIVTTTAGRIEARTDPWDPATEPGAEDFVDPAAHERKAALLHEAELQLAEFIGLDEVKRQVSRLKSSVAMELVRKQRGLTVAQRTHHLVFAGPPGTGKTTIARVVAKIYCGLGLLKRENIREVHRADLIGQHIGETEAKTNAIIDSALDGVLFLDEAYALVATGAKNDFGLVAIDTLLARMENDRDRLVVIIAGYRADLDKFLDTNEGLRSRFTRNIDFPSYTSHELVEIAHKMAEQRDSVFEQSALHDLEALFAKLAAESTPDTNGISRRSLDIAGNGRFVRNIVERSEEEREFRLDHSEHAGSGEFSDEELMTITADDVGRSVEPLLRGLGLSVRA

SEQ ID NO: 1381 - protein, 190 aa, Bacillus subtilis
EFIQIDTTNILFICGGRFDGIEQIIKRRLAQKVIGFGADNKAADLEKEDLLSKVLPEDLLRFGLIPEFIGRLPVIASLEKLDEEALVAILTKPKNALVKQFKKMLELDNVELEFEEEALSEIAKKAIERKTGARGLRSIIEGIMLDVMFELPSRDDIEKCVITGATVTHGEPPRLLLKDGTEVSQDKTSA

SEQ ID NO: 1382 - protein, 395 aa, Coleochaete scutata
LLGDNKVRAVSMSATDGLMRGMDVIDTGAPLSVPVGEATLGRIFNVLGEPVDELGPVDATITFPIHRSAPAFTQLDTKLSIFETGIKVVDLLAPYRRGGKIGLFGGAGVGKTVLIMELINNIAKAHGGVSVFGGVGERTREGNDLYMEMKESKVINEENISESKVALVYGQMNEPPGARMRVGLTALTMAEYFRDVNKQDVLLFIDNIFRFVQAGSEVSALLGRMPSAVGYQPTLSTEMGTLQERITSTKEGSITSIQAVYVPADDLTDPAPATTFAHLDATTVLSRGLAAKGIYPAVDPLDSTSTMLQPWIVGQEHYETAQGVKQTLQRYKELQDIIAILGLDELSEEDRLTVARARKIERFLSQPFFVAEVFTGSPGKYVSLVETIKGFQLIL

SEQ ID NO: 1383 - protein, 491 aa, Chlorobium tepidum TLS
MIQPDEPQDFPVKLIDKEQLTPTQIVEQLDKYIIGQKDAKRSVAIALRNRLRRQNVSEELRDEIMPNNIIMIGPTGVGKTEIARRLAKLAKAPFVKVEASKFTEVGYVGRDVESMIRDLVEQAVAMVRSEKTEEVREKAALLVEERLLDILLPPVSGLEESEHVGDEEEAVVVEGDAEVVVEKNLEREINRKSRQKMRERLRDGRMEDRQIELEVSSDGQGGMMQIFGPLGQMEEIGNIMQDLMSGMPKKRKKRRMTIAEARKYLEQEEVQKLIDMDAVVKEALRKVEDSGIVFIDEIDKIAAPTTGAGGKGPDVSREGVQRDLLPIVEGTAVSTKYGVVKTDHVLFIASGAFHVARPSDLIPELQGRFPIRVELKSLTEEDFFLILTQPRNALIKQYRAMLKTEQIDLEFTEEAIREIARTAAKVNETVENIGARRLHTILTNLLEELMFGIPEMVMDGTIDRNIVIDDNQVREKLGKLVADRDLSQYIL

SEQ ID NO: 1384 - protein, 434 aa, Bradyrhizobium japonicum USDA 110
MTDFSPREIVSELDRFIVGQTDAKRAVSIALRNRWRRQQLEGSLREEVLPKNILMIGPTGVGKTEIARRLAKLANAPFLKVEATKFTEVGYVGRDVEQIVRDLVEVAIAQVRERKRKDVQARAQLAAEERVLDALVGANASSATRESFRKKLRAGELNDKEIEIETQSSGGGMPMFEIPGMPGAQMGAISIGDIFGKLGGRSKTRRLTVESSHEILINEESDKLLDTEQLTLEAISAVENNGIVFLDEIDKICARDGRVGGDVSREGVQRDLLPLIEGTTVSTKHGAVKTDHILFIASGAFHVAKPSDLLPELQGRLPIRVELQALTRDDMRRILTEPEASLIKQYVALMQTEGVTLDITDNAIDALADVAVAVNSTVENIGARRLQTVMERVLDEISFTAPDRNGETIRVDADFVQKHVGDLAKNADLSRFIL

SEQ ID NO: 1385 - protein, 332 aa, Triticum aestivum
  unsure (1)..(332): unsure at all Xaa locations
MSAANRSQPIKLNRPVVGKARKLKDLMLKSDNRVCADCSAPDPKWASSNIGVFLCLKCGDVXRALGQDISNVLSLTLDDWSDSDIDSMIEVGGNSYANSIYEAFLPKDHPKPKPDSPMEYRTKFIRAKYETQDFLKPSLRISSKAGLESTNSLNSVDNSFSSTSRKHAPEDTREFVGQLNVTVVKGSGLAVRDMLTSDPYVVLSLGEQKAQTTVKASDLNPVWNEVLNLSVPRNYGPLKLEVYDHDTFSADDIMGEAEIDLKPMITAAMAFGDPSRHADMQIGRWFMTRDNCLLSDSIVNISSGKVKQEVYLKLQNVESGEMELELEWARLD

SEQ ID NO: 1386 - protein, 377 aa, Nepenthes alata
AVIGSGVLSLAWAIAQLGWIAGPAVMLLFSFVIYYTSILLADCYRVDDPIFGNRNYTYMDAVRSNLGGVKVKVCGLIQYLNLIGVAIGYTIAASISMMAIRRSNCFHNSGAKKPCHMSSNPYMIMFGILEIILSQIPDFDQIWWLSIVAAVMSFTYSTIGLSLGIAQVAANKAFKGSLTGISIGAVTQTQKIWRSFQALGDIAFAYSYSIILIEIQDTVKSPPSEAKTMKKASLISIVVTTAFYMLCGCMGYAAFGDIAPGNLLTGFGFYNPFWLLDIANAAIVVHLVGAYQVYCQPLFAFVEKSASGKWPKNAFINKGIKIQIPGFGAYDLNIFRLAWRTAFVITTTIISMLLPFFNDIVGILGAFGFWPFTVYFP

SEQ ID NO: 1387 - protein, 593 aa, Oryza sativa
  unsure (1)..(593): unsure at all Xaa locations
CGGLLGRNSXAVTTCRLPLTNQWDTQQIKTKKLNNAALETCETWRTSGNQAYTNGHFATAEEYYTRGINSVSGHDSSGYCSRALMLCYSNRAATRMSLGRMREALQDCLIATSIDPTFLKAKVRAANCQLALGDLEDALRSYTACLTSSKTSGSDRKMLAEASDGLERVQSVVDWISLSEELLKKRTVSEATTALQFISNALHISSHSDKLMEMKAEALLTLRKYEEVIQLCQETVVLAEKNSSASETTEWSGRLWRTYLICKTYFLSGKLEDALELLNKHQQVTNVKESEGRTSQECFSSLSTTIRELLSHKAAGNEAFQARRYSEAVEQYSAALARNSDSRPFSAVCFCNRAASYQALGQVTDAIADCSLAMVLDATYLKAISRRATLYEMIRDYGQAANDLRKLISLIEKQANNSGLSPKVLNKHSDLKQARTRLLSVEDEAKRDTPLNLYLILGIEPSSSPADIKKAYRKAALRHHPDKAAQLLVRNEKPDDGFWRDVAKEVHADADHLFKAIGEAYNVLSDSDKRQEYDIEENLRNATKRVSKGGRMHRSPEQRYTKQYDRGFNPRPWQSNRSSGSRSRWSGYDDDYW

SEQ ID NO: 1388 - protein, 465 aa, Xerophyta humilis
TTASLPWMTGTAVNPLFRAAYLAKSAKQRVTLVVPWLCESDQELVYPNSLTFGSPEEQEAYTRNWLEERIGFKADFRISFYPGKFSKERRSIIPVGDTSQFISAKDADIAILEEPEHLNWYHHGKRWTDKFNHVVGVVHTNYLEYIKREKYGAFQAFLVKHINNWVTRAYCHKVLRLSSATQNLPKSVICNVHGVNPKFLKIGERVAAERQNGHQAFSKGAYFLGKMVWAKGYRELIDLFSKHKNDLEGFKLDVYGNGEDSQEVQSTAKKLDLNLNFLKGRDHADDSLHGYKVFINPSVSDVYGTATAEALAMGKFVICADHPSNEFFMAFPNCLTYKTSKDFVARVKEALSSEPQPLTDEQRHNLSWEAATQRFMEYSELNKDCKIAVAQNSMQKTLRIKKSVSMPSLSEVVDGGLAFAHYCLTGNEVLRLATGAIPGTRDYDMPHCKDLHLLPPQVQHPVYGW

SEQ ID NO: 1389 - protein, 498 aa, Digitalis grandiflora
  unsure (1)..(498): unsure at all Xaa locations
XXXXXXXXXXXXXXXEKKNLGRIVQIIGPVLDVAFPPGKMPNIYNALVVKGRDTAGQPINVTCEVQQLLGNNRVRAVAMSATDGLTRGMEVIDTGAPLSVPVGGATLGRIFNVLGEPVDNLGPVETRTTFPIHRSAPAFIQLDTKLSIFETGIKVVDLLAPYRRGGKIGLFGGAGVGKTVLIMELINNIAKAHGGVSVFGGVGERTREGNDLYMEMKESGVINEENIAESKVALVYGQMNEPPGARMRVGLTALTMAEYFRDVNEQDVLLFIDNIFRFVQAGSEVSALLGRMPSAVGYQPTLSTEMGSLQERITSTKEGSITSIQAVYVPADDLTDPAPATTFAHLDATTVLSRGLAAKGIYPAVDPLDSTSTMLQPRIVGEEHYETAQRVKQTLQRYKELQDIIAILGLDELSEEDRLTVARARKIERFLSQPFFVAEVFTGSPGKYVGLAETIRGFQLILSGELDGLPEQAFYLVGNIDEATAKAMNLEMESNLKK

SEQ ID NO: 1390 - protein, 496 aa, Ensete ventricosum
MRTNPTTSSPAVSTLEEQNLGRIAQIIGPVLDVVFPPGKMPNIYNALVVKGRDTIGQQINVTCEVQQLLGNNRVRAVTMSATDGLMRGMEVIDTGAPLSVPVGGATLGRIFNVLGEPVDNLGPVDTSTTSPIHRPAPAFIQLETKLSIFETGIKVVDLLAPYRRGGKIGLFGGAGVGKTVLIMELINNIAKAHGGVSVFGGVGERTREGNDLYMEMKESGVINEKNIAESKVALVYGQMNEPPGARMRVGLTALTMAEYFRDVNEQDVLLFIDNIFRFVQAGSEVSALLGRMPSAVGYQPTLSTEMGSLQERITSTKEGSITSIQAVYVPADDLTDPAPATTFAHLDATTVLSRGLAAKGIYPAVDPLDSTSTMLQPRIVGEEHYEIAQRVKQTSQRYKELQDIIAILGLDELSEEDRLTVARARKIERFLSQPFFVAEVFTGSPGKYVGLAETIRGFQLILSGELDSLPEQAFYLVGNIDEATAKATNLEEENKL

SEQ ID NO: 1391 - protein, 449 aa, Trichodesmium erythraeum IMS101
MSKYDSHLKCSFCGKSQEQVRKLIAGPGVYICDECVELCNEILDEELFDSNATGAQPPIPRPAPAPQKRGTGTKRLSISQIPKPREIKNYLDAHVIGQEEGKKVLSVAVYNHYKRLSFLEAKKSGKSSQDEVELQKSNILLIGPTGCGKTLLAQTLADLLDVPFAVADATTLTEAGYVGEDVENILLRLLQVADLEVDEAQRGIIYIDEIDKIARKSENPSITRDVSGEGVQQALLKMLEGTVANVPPQGGRKHPYQDCIQIDTSNILFICGGAFVGLEKIVDQRIGKKSMGFIHQSGDSYQVKEKKVVDLMKQMEPNDLVKFGLIPELIGRIPMVAVVEPLDEETLMAILTKPQNALVKQYQKLLRMDNVKLEFEEDAVRAIAKEAFRRKTGARALRGIVEELMLDVMYELPSRKDVSRCTITKEMVEKRSTAELLLHPSSLPKPESA

SEQ ID NO: 1392 - protein, 483 aa, Austrobaileya scandens
  unsure (1)..(483): unsure at all Xaa locations
EEKNLGRITQIIGPVLDVAFPPGKMPNIYNSLVVKGQDTVGQQINVTCEVQQLLGNNRVRAVAMSATDGLMRGMEVIDTGAPLSVPVGGATLGRIFNVLGEPVDNLGPVDTRTTSPIHRPAPAFIQLDTKLSIFETGIKVVDLLAPYRRGGKIGLFGGAGVGKTVLIMELINNIAKAHGGVSVSGGVGERTREGNDLYMEMKESGVINEQNIAESKVALVYGQMNEPPGARLRVGLTALTMXEYFRDVNEQDVLLFIDNISRFVQAGSEVSALLGRMPSAVGYQPTLSTEMGSLQERITSTKEGSITSIQAVYVPADDLTDPAPATTFAHLDATTVLSRGLAAKGIYPAVDPLDSTSTMLQPRIVGEEHYETAQRVKQTSQRYKELQDIIAILGLDELSEEDRLTVARARKIERFLSQPFFVAEVFTGSPGKYVGLAETIRGFQLILSGELDGLPEQAFYLVGNIDEATAKAMNLEVESKLKK

SEQ ID NO: 1393 - protein, 489 aa, Pennantia corymbosa
GSGVSTLEKENLGRIAQIIGPVLDVAFSPGKMPNIYNALVVKGRDTGGQPINVTCEVQQLLGNNRVRAVAMSATDGLTRGMEVIDTGAPLSVPVGGATLGRIFNVLGEPVDNLGPVDTRTTSPIHRSAPAFIQLDTKLSIFETGIKVVDLLAPYRRGGKIGLFGGAGVGKTVLIMELINNIAKAHGGVSVFGGVGERTREGNDLYMEMKESGVINEQNIAESKVALVYGQMNEPPGARMRVGLTALTMAEYFRDVNEQDVLLFIDNIFRFVQAGSEVSALLGRMPSAVGYQPTLSTEMGTLQERITSTKQGSITSIQAVYVPADDLTDPAPATTFAHLDATTVLSRGLAAKGIYPAVDPLDSTSTMLQPRIVGEEHYEIAQRVKQTLQRYKELQDIIAILGLDELSEEDRLTVARARKIERFLSQPFFVAEVFTGSPGKYVGLAETIRGFQLILSGELDGLPEQAFYLVGNIDEATAKAMNLEMESNLK

SEQ ID NO: 1394 - protein, 483 aa, Sparganium americanum
SSPGVSTLEEKNLGRIAQIIGPVLDAVFPPGKMPNIYNALVVKGRDTLGQQINVTCEVQQLLGNNRVRAVAMSATDGLMRGMEVIDTGAPLSVPVGGATLGRIFNVLGEPVDNLGPVDTRTTSPIHRSAPAFIQLDTKLSIFETGIKVVDLLAPYRRGGKIGLFGGAGVGKTVLIMELINNIAKAHGGVSVFGGVGERTREGNDLYMEMKESGVINEKNLAESKVALVYGQMNEPPGARMRVGLTALTMAEYFRDVNEQDVLLFIDNIFRFVQAGSEVSALLGRMPSAVGYQPTLSTEMGSLQERITSTKEGSITSIQAVYVPADDLTDPAPATTFAHLDATTVLSRGLASKGIYPAVDPLDSTSTMLQPRIVGEEHYETAQRVKQTLQRYKELQDIIAILGLDELSEEDRLTVARARKIERFLSQPFFVAEVFTGSPGKYVGLAETIRGFQLILSGELDSLPEQAFYLVGNIDEATAKAMNL

SEQ ID NO: 1395 - protein, 978 aa, Kluyveromyces lactis
ARKELKRVTLEDHEESEYGAIYSVSGPVVIAENMIGCAMYELVKVGHDNLVGEVIRIDGEKATIQVYEETTGVTVGDPVLRTGKPLSVELGPGLMETIYDGIQRPLKAIKDISQSIYIPRGIDAPALSRTIKWQFTPGKFKVGDHISGGDIFGSIFENSLLDDHKILLPPRARGTVTWIASAGEYTVDEKILELEFDGVKYDYSMYHTWPVRVPRPVTEKLSADYPLLTGQRVLDSLFPCVQGGTTCIPGAFGCGKTVISQSLSKYSNSDAIIYVGCFSKGTEVMMGDGKDELIENIQVGDEVMGRDGLPRQVVGLPRGHDDMYQVTEKSEDNETAKISFQCNSSHKLVLVTPQDIRLTESKEKVTVAFNRLADISVGNGTESRTVRLVERAEKSFANAESNQAIINAAEFVTTIDTTSIEWTLEARDMLLVDSSIREVTQQLINPVLLEKEHLAGVLKSNDFQSSLAPQFSYLLGAFVGSSGKDNSEYLQQLSAQFDKKIVAEKSIDVQSNGKTVGTASIVISQEPVQENKRRKVAQVSLVSKIVQESFSSGIPSFMMSENINVRESFLAGIVDSQNQKLDDTVALKTLSVKTHDGIARLARSLGIRVSGKKQNQEYTLTLSGDALKSVSNWTSTSNIEKVDVIHKAQPISFDLEKIESADYFGVTLAEESDHKFLLSNMTLVHNCGERGNEMAEVLMEFPELFTEISGRKEPIMKRTTLVANTSNMPVAAREASIYTGITLAEYFRDQGKNVSMIADSSSRWAEALREISGRLGEMPADQGFPAYLGAKLASFYERAGKAVALGSPDRIGSVSIVAAVSPAGGDFSDPVTTSTLGITQVFWGLDKKLAQRKHFPSINTSVSYSKYTNVLNKYYEKNYPEFPVLRDRMKEILSNAEELEQVVQLVGKSALSDGDKITLDIASLIKEDFLQQNGYSTYDAFCPIWKTYDMMKSFISYHDEAQKSVSNGANWAKLSEAT

SEQ ID NO: 1396 - protein, 477 aa, Pseudomonas aeruginosa PAO1
MTADKKAKILATLGPATRSRDDIRALVEAGANLLRLNFSHGDYADHAQRFAWVREVEAELNYPIGVLMDLQGPKLRVGRFAAGAVQLQRGQTFTLDLSDAPGDERRVNLPHPEIIHALEPGMSLLLDDGKIRLEVVNCHSDAIETRVAVGGELSDRKGVNVPEAVLQLSPLTDKDRRDLAFGLELGVDWVALSFVQRPEDIDEARGLIGDKAFLMAKIEKPSAVSAIEAIAERADAIMVARGDLGVEVPAESVPGIQKRIVQVCRQLGKPVVVATQMLESMRFSPAPTRAEVTDVATAVGAGADAVMLSAETASGQYPREAVEMMAKIVRQVEAEPDYHVQLEVNRPQPDATVSDAISCAIRRVSRILPVAVLVNYTESGNSTLRAARERPKAPILSLTPNLRTARRLTVAWGVYSVVNEQLAHVDEICSTALDIALAQRMARRGDTVVVTAGVPFGRPGSTNMLRIETVAPPLGDL

SEQ ID NO: 1397 - protein, 269 aa, Buchnera aphidicola str. APS (Acyrthosiphon pisum)
MNRYQETFKRLSCLKEGCFIPFVVLGDPSLETSIKIIETLIKSGADALEIGIPFSDPLADGPTVQKSNLRALSKNNTFFEYFKILKQLRKKNKKLPIGILIYANLVYNQGIDNFYFQCFNSGLDSVLIADVPIEESKIFYNIANKYKINPIFICPPDADADFLYKISLYAQGFIYVLSRPGVTGIKNNTIALPRDFINKIKKYNSVPLLQGFGISNPKQIKEAISSGLSGVICGSAIINIIEKYLNQEKKMIKEIKKFTHLLKLSTKLE

SEQ ID NO: 1398 - protein, 587 aa, Triticum aestivum
  unsure (1)..(587): unsure at all Xaa locations
MQSLANTFRTRSFPFHSPQSIRRLLRLFNRAVPFLESKKHATTSRPQRIPIPSPPLPSPAAHRSGDRQQAMVSNGELSQPQAGEYGLAVMRRRPKTKIVCTLGPASRSVDMIEKLLRAGMCVARFNFSHGSHDYHQETLDNLHAAMDRTGILCAVMLDTKGPEIRTGFLKDGKPIQLRKGQEIVISTDYSIKGDDKMISMSYKKLAVDLKPGSVILCADGTITLTVLHCDKEQGLVRCCCENTAMLGERKNVNLPGVVVDLPTLTEKDREDILQWGVPNKIDMIALSFVRKGSDLVEVRKVLGEHAKSIMLMSKVENQEGVANFDDILAQSDAFMVARGDLGMEIPVEKIFYAQKVMIFKCNIQGKPVVTATQMLESMIKSPRPTRAEATDVANAVLDGTDCVMLSGETAAGAYPELAVQTMAKICLQAESCVDYSAVFKSIMSSAPIPMSPLESLASSAVRTANSAKATLILVLTRGGTTARLVAKYRPSMPILSVVVPELKTVEFDWICSDEGPARQSLIVRGVIPMLSAGTAKAXFDSQATEAALXLALEDAKEMGLCNXGDDSVAVHXRIGIAPVMKLLPTVS

SEQ ID NO: 1399 - protein, 272 aa, Guillardia theta
MIVIQWERIFIIFFLVYSSSFNNFINIGKINLKYFLFEIYLISNLIELFLLNTSFNGSGSLPKSKVFKAISYKKNINESFYEEILVNGYFMQIKFCKSCSIWRPPRASHCSVCDSCNMQFDHHCPWLGKCISLKNYRIFFLFLSLLTFFIMSILSIFFINSKKTYFMNNQYSFKLFCIELNPKSVYSKVVNTFFITSYILVLIFIISLIIFHLYLGFSGKTTSELLKFPSKNFWKWDIRKEFSRKFYELYNIGLCDKNYLKKKKILFEIPKI

SEQ ID NO: 1400 - protein, 490 aa, Calystegia macrostegia
MRSNPTTSGSEVSAVEKKNLGRIVKIIGPVLDVAFPPGKMPNIYNALVVQGRDNEQTNVTCEVQQLLGNNRVRAVAMSDTDGLMRGMEVINTGAPISVPVGGSTLGRIFNVLGQPVDNLGPVDTNTTSPIHRSAPAFIQLDTKLSIFETGIKVVDLLAPYRRGGKIGLFGGAGVGKTVLIMELINNIAKAHGGVSVFGGVGERTREGNDLYMEMKESGVINEENIAESKVALVYGQMNEPPGARMRVGLTALTMAEYFRDVNEQDVLLFIDNIFRFVQAGSEVSALLGRMPSAVGYQPTLSTEMGTLQERITSTKEGSITSIQAVYVPADDLTDPAPATTFAHLDATTVLSRGLAAKGIYPAVDPLDSTSMMLQPRIVGEEQYETAQRVKQTLQRYKELQDIIAILGLDELSEEDRLTVARARKIERFLSQPFFVAEVFTGSPGKYVGLAETIRGFQLILSGELDGLPEQAFYLVGNIDEATAKAMNLKT

SEQ ID NO: 1401 - protein, 395 aa, Lactobacillus gasseri
MAGNGVYICNECIDLSKKIIDDELKADSIKETKDLPKPMEIKKQLDEYVIGQDRAKKVLSVAVYNHYKRISQMDIDSSGTELQKSNIALIGPTGSGKTYLAQTLAKILNVPFAIADATTLTEAGYVGEDVENILLKLLQNADYDLERAQRGIIYIDEIDKISKKAENVSITRDVSGEGVQQSLLKILEGTIASVPPQGGRKHPQQQMIKIDTTNILFIVGGAFDGIENIVKNRLGKKTIGFGAENGLNQVDADDWQKNLTTGDLVKFGLIPEFIGRIPIITTLDKLSTKDLIRILTEPKNALVKQYKKLLSLDNVDLEFTEGALKAIADMAISRHMGARGLRSIVENSLMDVMYRTPSEDNIEKVEITKDVITKHAQPKITYKENESQEASEAAK

SEQ ID NO: 1402 - protein, 483 aa, Ptaeroxylon obliquum
  unsure (1)..(483): unsure at all Xaa locations
GPGVSTLAKKNPGNFAQIIGPVMDVAFPPGKMPNINNALVVKGRDTVGQPINVACEVQQLLGNNRVRAVAMSATDGLMRGMEVIDTGAPLSVPVGGATLGRIFNVLGEPVDNLGPVDTRTTSPIHKSAPAFIQLDTKLSIFETGIKVVDLLAPYRRGGKIGLFGGAGVGKTVLIMELINNIAKAHGGVSVFGGVGERTREGNDLYMEMKESGVINEQNIAESKVALVYGQMNEPPGARMRVGLTALTMAEYFRDVNEQDVLLFIDNIFRFVQAGSEVSALLGRMPSAVGYQPTLSTEMGSLQERITSTKEGSITSIQAVYVPADDLTDPAPATTFAHLDATTVLSRGLAAKGIYPAVDPLDSTSTMLQPRIVGEDHYETAQRVKQTLQRYKELQDIIAILGLDELSEEDRLTVARARKIERFLSQPFFVAEVFTGSPGKYVGLAETIRGFKLILSGELDGLPEQAFYLVGNIDEVTAKATXLE

SEQ ID NO: 1403 - protein, 585 aa, Bacteroides thetaiotaomicron VPI-5482
MATKGTVSGVIANMVTLVVDGPVAQNEICYISTGGDRLMAEVIKVVGSHVYVQVFESTRGLKVGAEAEFTGHMLEVTLGPGMLSKNYDGLQNDLDKMDGVFLKRGQYTYPLDKERIWHFVPMVSAGDKVVASAWLGQVDENFQPLKIMAPFTMNGTATVKTIMPEGDYKIEDTIAILTDEEGNDIPVTMIQKWPVKRAMTNYKEKPRPFKLLETGVRVIDTLNPIVEGGTGFIPGPFGTGKTVLQHAISKQAEADIVIIAACGERANEVVEIFTEFPELVDPHTGRKLMERTIIIANTSNMPVAAREASVYTAMSLAEYYRSMGLKVLLMADSTSRWAQALREMSNRMEELPGPDAFPMDISAIISNFYGRAGYVKLNNDETGSITFIGTVSPAGGNLKEPVTENTKKVARCFYALEQDRADKKRYPAVNPIDSYSKYIEYPEFEEYIKDHINDEWIGKVNELKTRLQRGKEIAEQINILGDDGVPVEYHVIFWKSELIDFVILQQDAFDEVDSVTPMERQEAILNMIIDICHTEFEFENFNEVMDYFKKMINVCKQMNYSKFKSEQYEGFQQQLKELIAERSVK

SEQ ID NO: 1404 - protein, 631 aa, Mycobacterium tuberculosis H37Rv
MAGVGEGDSGGVERDDIGMVAASPVASRVNGKVDADVVGRFATCCRALGIAVYQRKRPPDLAAARSGFAALTRVAHDQCDAWTGLAAAGDQSIGVLEAASRTATTAGVLQRQVELADNALGFLYDTGLYLRFRATGPDDFHLAYAAALASTGGPEEFAKANHVVSGITERRAGWRAARWLAVVINYRAERWSDVVKLLTPMVNDPDLDEAFSHAAKITLGTALARLGMFAPALSYLEEPDGPVAVAAVDGALAKALVLRAHVDEESASEVLQDLYAAHPENEQVEQALSDTSFGIVTTTAGRIEARTDPWDPATEPGAEDFVDPAAHERKAALLHEAELQLAEFIGLDEVKRQVSRLKSSVAMELVRKQRGLTVAQRTHHLVFAGPPGTGKTTIARVVAKIYCGLGLLKRENIREVHRADLIGQHIGETEAKTNAIIDSALDGVLFLDEAYALVATGAKNDFGLVAIDTLLARMENDRDRLVVIIAGYRADLDKFLDTNEGLRSRFTRNIDFPSYTSHELVEIAHKMAEQRDSVFEQSALHDLEALFAKLAAESTPDTNGISRRSLDIAGNGRFVRNIVERSEEEREFRLDHSEHAGSGEFSDEELMTITADDVGRSVEPLLRGLGLSVRA

SEQ ID NO: 1405 - protein, 451 aa, Oryza sativa (japonica cultivar-group)
MEFVANGKVILFLLFVSTSVLIVSPASPPRFHYINPHNFTTPASSSSSASASAVHRSRNNNNPSLSLVHRDAISGATYPSRRHQVVGLVARDNARVEHLEKRLVASTSPYLPEDLVSEVVPGVDDGSGEYFVRVGVGSPPTDQYLVVDSGSDVIWVQCRPCEQCYAQTDPLFDPAASSSFSGVSCGSAICRTLSGTGCGGGGDAGKCDYSVTYGDGSYTKGELALETLTLGGTAVQGVAIGCGHRNSGLFVGAAGLLGLGWGAMSLVGQLGGAAGGVFSYCLASRGAGGAGSLASSFYYVGLTGIGVGGERLPLQDSLFQLTEDGAGGVVMDTGTAVTRLPREAYAALRGAFDGAMGALPRSPAVSLLDTCYDLSGYASVRVPTVSFYFDQGAVLTLPARNLLVEVGGAVFCLAFAPSSSGISILGNIQQEGIQITVDSANGYVGFGPNTC

SEQ ID NO: 1406 - protein, 242 aa, Shigella boydii
LKERKEGAFVPFVTLRDPGIEQSLKIIDTLIEAGADALELGIPFSDPLADGPTIQNATLRAFAAGVTPAQCFEMLALIRQKHPTIPIGLLMYANLVFNKGIDEFYAQCEKVGVDSVLVADVPIEESAPFRQAALRHNVAPIFICPPNADDDLLRQIASYGRGYTYLLSRAGVTGAENRAALPLNHLVAKLKEYNAAPPLQGFGISTPDQVKAAIDAGAAGAISGSAIVKIIEQHINEPEKML

SEQ ID NO: 1407 - protein, 487 aa, Aegiceras corniculatum
MRINPTTSGPGASVLEKKNLGRIIQIIGPVLDVSFPPGKMPNIYNALVVKGRDMAGQPINVTCEVQQLLGNNRVRAVAMSATEGLTRGMEVIDTGAALSVPVGGATLGRIFNVLGEPVDNLGPVDTRTTSPIHRSAPAFIQLDTKLSIFETGIKVVDLLAPYRRGGKIGLFGGAGVGKTVLIMELINNIAKAHGGVSVFGGVGERTREGNDLHMEMKESGVINEENIAESKVALVYGQMNEPPGARMRVGLTALTMAEYFRDVNEQDVLLFIDNIFRFVQAGSEVSALLGRMPSAVGYQPTLSTEMGSLQERITSTKEGSITSIQAVYVPADDLTDPAPATTFAHLDATTVLSRGLAAKGIYPAVDPLDSTSTMLQPRIVGEEHYEIAQRVKQTLQRYKELQDIIAILGLDELSEEDRLTVARARKIERFLSQPFFVAEVFTGSPGKYVGLAETIRGFQLILSGKLDGLPEQAFYLVGNIDEATAKA

SEQ ID NO: 1408 - protein, 623 aa, Beta vulgaris
MPAVYGDRMTTFEDSEKESEYGYIRKVSGPVVVADGMNGAAMYELVRVGHDNLIGEIIRLEGDSATIQVYEETGGLTVNDPVLRTHKPLSVELGPGILGNIFDGIQRPLKTIAKRSGDVYIPRGVSVPPLDKDTQWDFQPKKLGVGDLLTGGDLYAIVDENSLMQHHVVLPPDAMGKITYIAPAGNYTIQDTVLELEFQGVVKKFTMLQTWPVRTPRPVASKLAADTPLLTGQRVLDALFPSVLGGTCAILGAFGCGKTVISQALSKYSNSDAVVYVGCGERGNEMAEVLMDFPQLTMTLPDGREESVMKRTTLVANTSNMPVAAREASIYTGITIAEYFRDMGYNVSMMADSGSRWAEALREISGRLAEMPADSGYPAYLAARLASFYEAAGKVKCLGGPERNGSVTIVGAVSPPGGDFSDPVTSATLSIVQVFWGLDKKLAQRKHFPSVNWLISYSKYSGALESFYEKFDSEFIDIRTKAREVLQREDDLNEIVQLVGKDALAETDKITLDTAKLLREDYLAQNAFTAYDKFCPFYKSVWMMRNIIHFYNLANQAVERGAGSDGQKITYSLIKLRLGDLFYRLVSQKFEDPAEGEDALVAKFKKLNEDLTAAFRNLEDETR

SEQ ID NO: 1409 - protein, 585 aa, Halobacterium sp. NRC-1
MSQAEAITDTGEIESVSGPVVTATGLDAQMNDVVYVGDEGLMGEVIEIEGDVTTIQVYEETSGIGPGQPVDNTGEPLTVDLGPGMLDSIYDGVQRPLDVLEDEMGAFLDRGVDAPGIDLDTDWEFEPTVEAGDEVAAGDVVGTVDETVSIEHKVLVPPRSDGGEVVAVESGTFTVDDTVVELDTGEEIQMHQEWPVRRQRPTVDKQTPTEPLVSGQRILDGLFPIAKGGTAAIPGPFGSGKTVTQQSLAKFADADIVVYIGCGERGNEMTEVIEDFPELPDPQTGNPLMARTTLIANTSNMPVAARESCIYTGITIAEYYRDMGYDVALMADSTSRWAEAMREISSRLEEMPGEEGYPAYLAARLSEFYERAGYFENFNGTEGSISVIGAVSPPGGDFSEPVTQNTLRIVKTFWALDSDLAERRHFPAINWDESYSLYKDQLDPWFTDNVVDDWAEQRQWAVDILDEESELEEIVQLVGKDALPEDQQLTLEVARYIREAWLQQNALHDVDRYCPPEKTYAILSGIKTLHEESFEALDAGVPVEEITSIDAAPRLNRLGTTPDDEHEAEVAEIKQQITEQLRELY

SEQ ID NO: 1410 - protein, 495 aa, Forstera bellidifolia
NPTTSGSGVSTLEKKNLGRIAQIIGPVLDVAFSPGKMPNIYNALVVKGRDTAGEPINVTCEVQQLLGNNRVRAVAMSATDGLTRGMEVIDTEAPLSVPVGGATLGRIFNVLGEPVDNLGPVDTRTTSPIHRSAPAFIQLDTKLSIFETGIKVVDLLAPYRRGGKIGLFGGAGVGKTVLIMELINNIAKAHGGVSVFGGVGERTREGNDLYMEMKESGVINEENIAESKVALVYGQMNEPPGARMRVGLTALTMAEYFRDVNEQDVLLFIDNIFRFVQAGSEVSALLGRMPSAVGYQPTLSTEMGTLQERITSTKEGSITSIQAVYVPADDLTDPAPATTFAHLDATTVLSRGLAAKGIYPAVDPLDSTSTMLQPRIVGEEHYEIAQRVKQTLQRYKELQDIIAILGLDELSEEDRLTVARARKIERFLSQPFFVAEVFTGSPGKYVGLAETIKGFQLILSGELDGLPEQAFYLVGNIDEATAKAMNLEMESSLKK

SEQ ID NO: 1411 - protein, 80 aa, Glycine max
MIFSTTELAEILHMKMKSPSDCSLLYGFKLHPSCSIEAIGELIAREITEEQRKQMNGGLVDTLLINARENLDSRLDFRGT

SEQ ID NO: 1412 - protein, 615 aa, Ralstonia metallidurans
MRDPVRRRDDGDGARQWPWRSQCRVPAVAGGVARRPARCARDRLRHRWHRRLRRQCRRAAWPRFADARRGTRPVCPRASGQQRRVRILCRYRRPDRHRPDPYQRERFSRDPDHLIAPCKERGREETLMRRQRKAKIVATLGPASTDIAVIRQLFDAGADVFRLNFSHGTHEDHRARYDAVRQVEAETGRPIAILADLQGPKLRIGTFAAGKVAVSAGDTFVLDSDPTPGDAKRVYLPHPELFKAANAGQSLLIDDGKVRLNIESVASGSITTRVANNGTLSDRKGVNVPDAVIPIPALTEKDRKDLAFALELGADWIALSFVQRPSDILEARELIGTRAGVLSKIEKPAALQQLEEIVRVSDAVMVARGDLGVELPPERVPGVQKRILRICRQLGKPIVIATQMLESMIDSPVPTRAEASDVASAIYDGADAVMLSAESANGRHPVAAVSIMNRIITEVENDPLYRNMIDAQHEAPLSTRQDAICAALREVTQIIGAKATVTYTSSGATALRAARERPCAPIVSITPNLEIARRLAITWGVHSTVSPDVQSVDEMVEAAARAALVEGYAAPGDQITIAAGMPFGQGGTTNLLRVAEVGTEVAGLDIGKVPAAEAV

SEQ ID NO: 1413 - protein, 598 aa, Bacillus cereus
IYERPDANLKNVIFVSGRKGTGIYKSVKYLTAIMNEYDLYEKPDVHYIDISSSLGASDIESTFLSDVYRGIKSESDVLYFDNVDKCPPDLISKLSELIMDGKIKLKDRYVYNANWQSLEKTYSSLAEKSIDSIQIENKLIILSTEKDLKDIRTMFPATVLEKIIDYPQTSVLPPRTLTKISDRYLKKYQKRIHTKLQVNMNYTHGVSDFIVEKANLTMGVHGIKSYIEDDIYQSITNLRISGKIEPGIIYQLTASDELYLDDGVEKIQVTRKKAGAENLENIKKEFEKVIGLNAVKERVFQLEEFLALQKIRQSRGAKQTRLTMNFIFTGNPGTGKTTIARLVAKYLKALGYLSSGHLVEVDRARLVAQYVGQTGPKTQAVIDSAKGGVLFIDEAYSLARGGENDFGKEAIDTLVKGMEDLREDLVVILAGYKDEMDDFLKTNPGLQSRFNNHIDFPDYTSEELFMISEKIVESEGFTIADDLKDDLIEEFTRKQIPGKNDSGNGRLARNIVEKAIAEQSGRLKNSGESLKFLSDEELNMLTKEDFGLGGENTFDLNAELDKIIGLDQVKEFMREMELQLVAQKKRKTAGLHSTMNQS

SEQ ID NO: 1414 - protein, 496 aa, Dimerocostus strobilaceus
  unsure (1)..(496): unsure at all Xaa locations
MRXNPTTSSPAVSTLEEQNLGRTAQIIGPVLDVVFPPGKMPNIYNALVVKGRDTVGQQINVTCEVQQLLGNNRVRAVAMSATDGLMRGMEVIDTGAPLSVPVGGATLGRIFNVLGEPVDNLGPLDTSTTSPIHRPAPAFIQLDTKLSIFETGIKVVDLLAPYRRGGKIGLFGGAGVGKTVLIMELINNIAKAHGGVSVFGGVGERTREGNDLYMEMKESGVINEKNIAESKVALVYGQMNEPPGARMRVGLTALTMAEYFRDVNEQDVLLFIDNIFRFVQAGSEVSALLGRMPSAVGYQPTLSTEMGSLQERITSTKEGSITSIQAVYVPADDLTDPAPATTFAHLDATTVLSRGLAAKGIYPAVDPLDSTSTMLQPRIVGEEHYETAQRVKQTSQRYKELQDIIAILGLDELSEEDRLTVARARKIERFLSQPFFVAEVFTGSPGKYVGLAETIRGFQLILSGELDSLPEQAFYLVGNIDEATAKAMNLEGESKL

SEQ ID NO: 1415 - protein, 422 aa, Adenophorus abietinus
AFSPGEMPNIYNSLVVKGQNPAGQQIHVTCEVQQLLGNNEVRAVAMSATDGLTRGMGAIDTGAPLSVPVGETTLGRISNVLGEPVDNLGPVRSSAISPIHRSAPAFTQLDTKLSIFETGIKVVDLLAPYRRGGKIGLFGGAGVGKTVPITESINNIAKAHGGVSVFGGVGERTREGNDLYMEMKESKVINEQNISESKVALVYGQMNEPPGARMRVGSTALTMAEYFRDVNKQDVLLFIDNIFRFVQAGSEVSALLGRMPSAVGYQPTLGTEMGSLQERITSTKEGSITSIQAVYVPADDLTDPASATTSAHLDATTVLSRGLAAKGIYPAVDPLDSTSTMLQPWIVGEEHYETAQGVKQTLQRYKELQDIIAILGLDELSEEDRLTVARARKIERFLSQPFFVAEVFTGSPGKYVSLSETI

SEQ ID NO: 1416 - protein, 476 aa, Cordia macrostachya
GSGISTLEKKNLGRIVQIIGPVLDVAFPPGKMPNIYNALVVKGRDIVGQPINVTCEVQQLLGNNRVRAVAMSATDGLTRGMEVIDTGAPLSVPVGGATLGRIFNVLGEPVDNLGPVDTRTTSPIHRPAPAFIQLDTKLSIFETGIKVVDLLAPYRRGGKIGLFGGAGVGKTVLIMELINNIAKAHGGVSVFGGVGERTREGNDLYMEMKESGVINEENIAESKVALVYGQMNEPPGARMRVGLTALTMAEYFRDVNEQDVLLFIDNIFRFVQAGSEVSALLGRMPSAVGYQPTLSTEMGTLQERITSTKAGSITSIQAVYVPADDLTDPAPATTFAHLDATTVLSRGLAAKGIYPAVDPLDSTSTMLQPRIVGEEHYETAQRVKQTLQRYKELQDIIAILGLDELSEEDRLIVARARKIERFLSQPFFVAEVFTGSPGKYVGLAETIRGFQSILSGELDGLPEQAFYLVGNIDEAT

SEQ ID NO: 1417 - protein, 74 aa, Cucumis melo
FDALVDTVYSALEKNGGGSLEIVVSETGWPTDGGEAATVDNARTYTNNLIQRVKQGTPKRQGRAIETYVFAMSD

SEQ ID NO: 1418 - protein, 438 aa, Glycine max
  unsure (1)..(438): unsure at all Xaa locations
MYVVPPPQRSDPGSGSGDLRVYQAWKGSNKFFLQGRFIFGPDARSLALTIFLIAAPVAVFCVYVARKLIDDFSDHLGVTIMAIAVIFTIYVLVLLLLTSGRDPGIIPRNAHPPEPEGFEGSLDVGAGQTPQLRLPRIKEVEVNGITVKVKYCDTCMLYRPPRCSHCSICNNCVERFDHHCPWVGQCIGLRNYRFFFMFVFSTTLLCIYVFAFCWVYIRRIMEAEETTHLDGTIXKNYGISXIIYTFISMWFVGGLTAFHLYLISTNQTTYENFRYRYDRRANPXNTGVFNNFLEIFCTSIPQSKNNFRAKVPMEPVLPARSVGGGFMSPSMGKAVDDIEMGRKTVWADMGTALDPSEGQLNDRVAVKDGEFGELSPEIRTTVDETSHRAGMHPRRSSWGRKSGSWEMSPEVLALAAKVGESNRMGGGSSSLTTENRHT

SEQ ID NO: 1419 - protein, 347 aa, Arabidopsis thaliana
MLIWFDVTTLHRQKKVKTEPSWRIFSLKELHAATNSFNYDNKLGEGRFGSVYWGQLWDGSQIAVKRLKAWSSREEIDFAVEVEILARIRHKNLLSVRGYCAEGQERLIVYDYMPNLSLVSHLHGQHSSESLLDWTRRMNIAVSSAQAIAYLHHFATPRIVHGDVRASNVLLDSEFEARVTDFGYDKLMPDDGANKSTKGNNIGYLSPECIESGKESDMGDVYSFGVLLLELVTGKRPTERVNLTTKRGITEWVLPLVYERKFGEIVDQRLNGKYVEEELKRIVLVGLMCAQRESEKRPTMSEVVEMLMIESKEKMAQLEANPLFNGNNDGEVIDESSEIISEVRDHQ

SEQ ID NO: 1420 - protein, 442 aa, Magnetospirillum magnetotacticum
MSAAAFSPREIVSELDRFIVGQNDAKRAVAIALRNRWRRQQLSESLREEVLPKNILMIGPTGVGKTEIARRLARLAQAPFLKVEATKFTEVGYVGRDVEQIVRDLVEVAILMTRERLRKQVTAKAEINAEERLLDALVGETAAAETRQKFRKMLREGALDSKEVEIQVADTGGAGLPSFDIPGMPGSQVGMINLSDMLGKALGGGRTKPRKLPVPEALAALTAEESDKLLDQDKVVKDAIWAVENHGIVFIDEIDKICARSSEHHVGGDVSREGVQRDLLPLIEGTTVATKHGSVKTDHVLFIASGAFHLAKPSDLLPELQGRLPIRVELKALSRDDLVRILTEPEASLLKQYEALLATEEVILDFEPGSVEAIADLAAEINSTVENIGARRLQTVMERLLEDISFTAPDQPPGTKVTITAEMVRDRVGALAKTADLAKFIL

SEQ ID NO: 1421 - protein, 488 aa, Ipheion dialystemon
FNPTTSGPTVSTLEEKNLGRIAQIIGPVLDVVFPPGKMPNIYNALVVKGRDTVGQQINVTCEVQQLLGNNRVRAVAMSATDGLTRGMEVIDTGAPLSVPVGGATLGRIFNVLGEPVDNLGPVDTRTTSPIHRSAPAFIQLDTKFSIFETGIKVVDLLAPYRRGGKIGLFGGAGVGKTVLIMELINNIAKAHGGVSVFGGVGERTREGNDLYMEMKESGVINEKNIAESKVALVYGQMNEPPGARMRVGLTALTMAEYFRDVNEQDVLLFIDNIFRFVQAGSEVSALLGRMPSAVGYQPTLSTEMGSLQERITSTKEGSITSIQAVYVPADDLTDPAPATTFAHLDATTVLSRGLAAKGIYPAVDPLDSTSTMLQPRIVGEEHYETAQRVKETLQRYKELQDIIAILGLDELSEEDRLTVARARKIERFLSQPFFVAEVFTGSPGKYVGLAETIRGFQLILSGELDSLPEQAFYLVGNIDEATAKAMIV

SEQ ID NO: 1422 - protein, 295 aa, Glycine max
  unsure (1)..(295): unsure at all Xaa locations
IDPLNDKRAGNENFKSGKYMEAVENYTAALSCNVKSRPFMAICFCNRAAAHQALGQIADAIADCSVAIALDGNYAKAISRRATLHEMVRDYEQAACDLKRLIAVLETQSNERAKQSDSPSGSNAVKELRQAHQRLLSVEDQAKKGAPLDVYLILGIKSADTATDIKKAYHKAALRHHPDKAXQLWARSEVGDEGQLWKEISQEVYKDADKLFKMIGEAYAVLSDPAXRSEYDLEEEIREASKLCNRGGASSRSSNPYGCGRPFGFDSYKSPSDRTSNRRNGRDHWKTHGHSYSRW

SEQ ID NO: 1423 - protein, 150 aa, Triticum aestivum
  unsure (1)..(150): unsure at all Xaa locations
RVFFFFFFAGYCEQMKRVIASNDGFCRRVTMFFDFDDFTTTELAEILLLKMNSLTDTSLLYGFRLHRSCTRGAVGELIARETTEEWLKQMNGGLVDTLLVNARENLDLRLDFSCNDAETMITITLEDXEAGLRQISRQRHLWGPTIRNIL

SEQ ID NO: 1424 - protein, 598 aa, Aeropyrum pernix
MLAVKGSIVRISGPLVVAEGMSGAQMYEMVYVGEDRLIGEITRIRGDRAFIQVYESTSGLKPGEPVVGTGAPLSVELGPGLLGTIYDGVQRPLPIIAEKVAEVDPRRRMFVERGIQAPPLPRDRKFHFKPEPLKEGDKVEGGDALGRVPETSLIEHVVMVPPGIRGRLKWLASEGDYSVEDTIAVVERDGRDVEIRMHQRWPVRIPRPFKEKLEPQLPLITGVRIIDTFFPMAKGGTGAVPGGFGTGKTVTLHSLAQWSEARVVIYIGCGERGNEMTEVLERFPQYKDPWTGKPLMDRTVLIANTSNMPVAAREASIYVGITIAEYYRDMGYDVLLVADSTSRWAEALREIAGRLEEMPAEEGYPSYLASRLAEFYERAGRVKALGSPERSGSVTVVGAVSPPGGDFSEPVTSHTTRFIRVFWALDTKLAYSRHYPAINWLMSYSAYVDLVTQWWHENVDKRWREYRDEAMDILLRESELQEIVRLVGTEGLDEKDKMVLETARLIKDGFLKQNAFDPIDAFATPQKQFRLLKMIMDIHRKSLELIEKGVTTQQILQALGRLYIDIVKAKFTIPNDQLEKIDEIRDRALKALDELVSG

SEQ ID NO: 1425 - protein, 402 aa, Nitella praelonga
LLGDNKVRAVAMSATDGLMRGMEVIDTGIPLSVPVGETTLGRIFNVLGEPVDNLGPVNTSITFPIHRSAPAFTQLDTKLSIFETGIKVVDLLAPYRRGGKIGLFGGAGVGKTVLIMELINNIAKAHGGVSVFGGVGERTREGNDLYMEMKESKVINEDNISESKVALVYGQMNEPPGARMRVGLTALTMAEYLRDVNKQDVLLFIDNIFRFVQAGSEVSALLGRMPSAVGYQPTLSTEMGTLQERITSTKEGSITSIQAVYVPADDLTDPAPATTFAHLDATTVLSRNLAAKGIYPAVDPLDSTSTMLQPWIVGEEHYETAQGVKETLQRYKELQDIIAILGLDELSEEDRLIVARARKIERFLSQPFFVAEVFTGSPGKYVSLIDTIKGFQMILSGELDHL

SEQ ID NO: 1426 - protein, 244 aa, Glycine max
MEFPNEAIPEGCSQKKTGRGKIEIKRIENTTNRQVTFCKRRNGLLKKAYELSVLCDAEVALVVFSSRGRLYEYANNSVRGTIERYKKACAASTNAESVSEANTQFYQQEASKLKRQIRDIQNLNRHILGEGLSSLSLKELKNLESRLEKGLSRVRSRKHETLFADIEFMQKREIELQNHNNFLRAKIAENERAQQRQQDMIPGTECESTIPNSQSYDRNFFPVNLIDSNNNQYSRQDQTALQLV

SEQ ID NO: 1427 - protein, 360 aa, Lycopersicon esculentum
MATSQIAIIVLLGLLVATNIHITEAQIGVCYGMMGNNLPSHSEVIQLYKSRNIRRLRLYDPNHGALNALRGSNIEVILGLPNVDVKHISSGMEHARWWVQKNVRDFWPHVKIKYIAVGNEISPVTGTSNLAPFQVPALVNIYKAIGEAGLGNDIKVSTSVDMTLIGNSYPPSQGSFRNDVRWFTDPIVGFLRDTRAPLLVNIYPYFSYSGNPGQISLPYALFTAPNVVVQDGSRQYRNLFDAMLDSVYAAMDRTGGGSVGIVVSESGWPSAGAFGATHENAQTYLRNLIQHAKEGSPRKPGPIETYIFAMFDENNKNPELEKHFGMFSPNKQPKYNLNFGVSERVWDITNSTASSLTSEI

SEQ ID NO: 1428 - protein, 476 aa, Maesa myrsinoides
  unsure (1)..(476): unsure at all Xaa locations
LGHIIQIIGPVLDVXFPPGKMPNIYNALVVKGRDTAGQPINVTCEVQQLLGNNRVRAVAMSATDGLTRGMEVIDTGAALSVPVGGATLGRIFNVLGEPVDNLGPVDTRTTSPIHRSAPAFIQLDTKLSIFETGIKVVDLLAPYRRGGKIGLFGGAGVGKTVLIMELINNIAKAHGGVSVFGGVGERTREGNDLYMEMKESGVINEENIAESKVALVYGQMNEPPGARMRVGLTALTMAEYFRDVNEQDVLLFIDNIFRFVQAGSEVSALLGRMPSAVGYQPTLSTEMGSLQERITSTKEGSITSIQAVYVPADDLTDPAPATTFAHLDATTVLSRGLAAKGIYPAVDPLDSTSTMLQPRIVGEEHYETAQKVKQTLQRYKELQDIIAILGLDELSEEDRLTVARARKIERFLSQPFFVAEVFTGSPGKYVGLAETIRGFQLILSGELDGLPEQAFYLVGNIDEATAKAMKLEMESN

SEQ ID NO: 1429 - protein, 589 aa, Glycine max
GVSGTALAASLLRDGWSLAKMYAKYQEVVDALRHEQLGRKESEAVLQRVLYELEQKAEAILDERVEHDKMADAYSLMNQKLQNSLNENSNLEKTIQELKADLKRRERDYNLVLKETDDLQKQVTVLLKECRDIQLRCGSMGYDIVDDASNIASRTSRETEAEDVISEHLLTFKDINGLVEQNVQLRSLVRSISGHIENQEVEFKEKLEMELKKHTEESASKVAAVLQRAEEQGHMIEALHASVAMYKRLYEEEHNLHLSHTHSSEALAAVAAVGRNNIKTSIESSQEAAKKSLEKAAERVRCLEDDLAKSRSEIIVLRSERDKSALEANFAREKLNDIMKEFEHQKTEAKGILERNIEFSQLVVDYQRKLRESTESLIAAEELSRKLSMELSVLKQEKEVISNAEKRASDEVHSLSARVQRLQASLSTIQSTEEVREEARAAERVKQEEYIKKLEREWAEAKQELNEERENVRRFTSDRDQTLKNSLRQVEDMSKELANALRAVASAESRAAVAEAKLSGLQRKMGSTDDKLVEIGGVSGSSTLSSDEVVAELQKAKDEIEKWKEEAHANKAHMLQYKSIAEVNEDALK

SEQ ID NO: 1430 - protein, 498 aa, Callitriche heterophylla
  unsure (1)..(498): unsure at all Xaa locations
XXXXXXXXXXXXXXXEKKNLGRIVQIIGPVLDVAFPPGKMPNIYNAVIVKGRDTAGQPINVTCEVQQLLGNNRVRAVAMSATDGLTRGMEVINTGAPLSVPVGGATLGRIFNVLGEPVDNLGPVDTSTTFPIHRSAPAFIQLDTKLSIFETGIKVVDLLAPYRRGGKIGLFGGAGVGKTVLIMELINNIAKAHGGVSVFGGVGERTREGNDLYMEMKESGVINEENIAESKVALVYGQMNEPPGARMRVGLTALTMAEYFRDVNEQDVLLFIDNIFRFVQAGSEVSALLGRMPSAVGYQPTLSTEMGTLQERITSTKEGSITSIQAVYVPADDLTDPAPATTFAHLDATTVLSRGLAAKGIYPAVDPLDSTSTMLQPRIVGEEHYETAQRVKETLQRYKELQDIIAILGLDELSEEDRLTVARARKIERFLSQPFFVAEVFTGSPGKYVGLAETIRGFQLILSGELDGLPEQAFYLVGTIDEVTAKAINLEMESNLKK

SEQ ID NO: 1431 - protein, 578 aa, Thermus thermophilus
MIQGVIQKIAGPAVIAKGMLGARMYDICKVGEEGLVGEIIRLDGDTAFVQVYEDTSGLKVGEPVVSTGLPLAVELGPGMLNGIYDGIQRPLERIREKTGIYITRGVVVHALDREKKWAWTPMVKPGDEVRGGMVLGTVPEFGFTHKILVPPDVRGRVKEVKPAGEYTVEEPVVVLEDGTELKMYHTWPVRRARPVQRKLDPNTPFLTGMRILDVLFPVAMGGTAAIPGPFGSGKTVTQQSLAKWSNADVVVYVGCGERGNEMTDVLVEFPELTDPKTGGPLMHRTVLIANTSNMPVAAREASIYVGVTIAEYFRDQGFSVALMADSTSRWAEALREISSRLEEMPAEEGYPPYLAARLAAFYERAGKVITLGGEEGAVTIVGAVSPPGGDMSEPVTQSTLRIVGAFWRLDASLAFRRHFPAINWNGSYSLFTSALDPWYRENVAEDYPELRDAISELLQREAGLQEIVQLVGPDALQDAERLVIEVGRIIREDFLQQNAYHEVDAYCSMKKAYGIMKMILAFYKEAEAAIKRGVSIDEILQLPVLERIGRARYVSEEEFPAYFEEAMKEIQGAFKALA

SEQ ID NO: 1432 - protein, 196 aa, Oryza sativa
  unsure (1)..(196): unsure at all Xaa locations
XTRGQAIACFMKYMNTWVTRIYCHKIIRLSGATQDLPRSVVCNVHGVNPKFLEVGKLKLKQLRNGEIAFTKGAYYIGKMVWSKGYRERLDLLSKYQSKLVGLEVDLYGSGEDSDEVRKSAELLSLAVKVHPGRDHADPLFHDYKVFINPSTTDVVCTTTAEALAMGKIVICANHPSNEFFKQFPNCRTYDSGEEFX

SEQ ID NO: 1433 - protein, 509 aa, Vicia faba
MLQRSRTLPSKIYQGVIEERKDGRHYIELEPLPKMETETKPITIQSKCLDDDGRVKRTGTFWTASAHIITAVIGSGVLSLSWAIAQLGWAVGPVVMVLFAVVNLYTSTLLTQCYRSDDSVAGPRNYTYTDAVKSILGGKKFKICGVIQYVNLFGVAIGYTIAASVSMMAIKRSNCYHESHGNDPCHMSSNVYMIAFGIAEVILSQIPDFDQVWWLSIVAAIMSFTYSAVGLGLGVAKVAENGTFHGRLMGISIGTVTPAGTVTGTQKVWRSLQALGAMAFAYSFSIILIEIQDTIKSPPAEHKTMKKATMLSIMVTTVFYILCGSMGYAAFGDHVPGNLLTGFGFYNPYWLLDIANFAIVVHLVGAYQVFSQPFFAFVEKWSAHKWPKNKFVTEEYDIPIPCIGVYKLNLFRLIWRTIFVLLTTLIAMLLPFFNDVVGLLGAFGFWPLTVYFPIDMYISQKKIGRWTNRWLGLQMLSGCCLIISTLAAVGSIAGVVLDLKTYKPFKTSY

SEQ ID NO: 1434 - protein, 1187 aa, Arabidopsis thaliana
MSKFGELNPAFSGAGRSSSNNNPDASFNSAPFPRSSSGLSKPRFSKVRRQVKSQNLKPSGTSDSLPGQSFNPFHFRGSFSGDPTPSEIGFGRSSNEGFVFGGSSHVDKLQSDEKIGIRVMEEMERLKIESEGKASRLPEDMQNLNSSFSFGVKKGSNNSVFATVELPTLLSNKLIIDSSSRSTGHVIQESMEKLNISERGTDQKQNNNVKSKVSMDYVGEKILSDDLSRKLSVGSMTTDGNHSGDSFQGSVNEKKVHDFNSSCPMNYSFVGTEPSQNLNARNVHDVSSTVNTSDFNFVSNQDSVKTGFMEFKTPNSKVNPFSSLDQKLGFNAKKDSVGATTRARRKGGKQPVKVQLNIGREFAFAESAIPNGSNEAPEAYSPMDISPYEETEVCREFSADIPPTAPNYLFDAELVAATERMEINEGDEVNNYQAEEFNTGNCADHEDLAGDSISGAETESFKSAAEEMETSSETFATASESEVTSRYKSDRKENDDHSLSNTDAASSSFTFSASSFSGVQGPLSTSKRINRKKNPIKLGQDPYILIPNATLPLKSSQHSPLTGVQSHFSTGKPSERDPLTRLHKPINNSVMEKARIEKDVSNAAQEACEKWRLRGNNAYKIGDLSRAEESYTQGIDSVPRIETSRNCLRALMLCYSNRAATRMALGRMREAIADCTMASSIDSNFLKVQVRAANCYLSLGEIEDASRYFKKCLQSGSDICVDRKIIVEASEGLQKAQRVSECMHEAGRRLQLRTLTDAEKALEILEDSLLISTYSEKLLTMKGEALLMLEKYDAAIKLCEQTVDLAGKNSPPDSHDTPKDINFRIWQCHLMLKSSFYMGKLEEAIASLEKQEQLLSATKREGNKTLESSIPLAATIRELLRLKVLPSSSMSIALNLHLLFRIQLPAAGNEAFQSGRHTEAVEHYTAALACNVESRPFTAVCFCNRAAAYKALGQFSDAIADCSLAIALDQNYSKAISRRATLFEMIRDYGQAASDMERYVNILTKQMEEKTSGTLDRSTSMSNDIRQARIRLSELEEKSRKENSLDMYLVLGVVPSCSASDIRKAYRKAALKHHPDKAGQSLTRNETKDERLWKEIGEEVRKDTDKLFKMIGEAYAVLSDPAKRSQYDLEEEMHNSQKRRDGSSTSGADTDNYPFHSSRRNWREGWSSRKDPSTPRWFDPNRSNRYP

SEQ ID NO: 1435 - protein, 268 aa, Oryza sativa
  unsure (1)..(268): unsure at all Xaa locations
MDEGGGAGAAAAAAGNXGGGGGAPQXARSAEDVFRDFRARRAGIVKALTTDVEKFYRQCDPEKENLCLYGLPNETWDVTLPAEEVPPELPEPALGINFARDGMIEKDWLSLVAVHSDAWLLSVAFYFGARFGFDKEARRRLFTMINGLPTVYEVVTGIAKKQTKVSNGSSKSNKSNPKPSKQSNSNSKPAKPPQPKDEEDSGPEGTEDEDQAYMCGACGETYANGEFWICCDVCEKWFHGKCVRITPAKAEHIKQYKCPGCSSKRSRE

SEQ ID NO: 1436 - protein, 257 aa, Medicago sativa
MEGMAQHPVPRTVEEVFSDYKGRRAGLIKALTTDVEKFYQLVDPEKENLCLYGFPNETWEVNLPVEEVPPELPEPALGINFARDGMQEKDWLSLVAVHSDSWLLAVAFYFGARFGFGKNDRKRLFQMINDLPTVFELATGTAKQSKDQLTAHNNGSNSKYKSSGKSRQSESQTKGVKMSAPVKEEVDSGEEEEEDDDEQGATCGACGDNYGTDEFWICCDMCEKWFHGKCVKITPAKAEHIKQYKCPGCSIKKPRIG

SEQ ID NO: 1437 - protein, 498 aa, Decumaria barbara
  unsure (1)..(498): unsure at all Xaa locations
XXXXXXXXWSWISTLEKKNLGRIAQIIGPVLDVVFPPGKMPNIYNALVVKGRDTGGQPINVTCEVQQLLGNNRVRAVAMSATDGLTRGMEVIDTGAPLSVPVGGATLGRIFNVLGEPVDNLGPVDTGTTSPIHRSAPAFIQLDTKLSIFETGIKVVDLLAPYRRGGKIGLFGGAGVGKTVLIMELINNIAKAHGGVSVFGGVGERTREGNDLYMEMKESGVINEQNIAESKVALVYGQMNEPPGARMRVGLTALTMAEYFRDVNEQDVLLFIDNIFRFVQAGSEVSALLGRMPSAVGYQPTLSTEMGSLQERITSTKEGSITSIQAVYVPADDLTDPAPATTFAHLDATTVLSRGLAAKGIYPAVDPLDSTSTMLQPRIVGEEHYETAQRVKQTLQRYKELQDIIAILGLDELSEEDRLTVARARKIERFLSQPFFVAEVFTGSPGKYVGLAETIRGFQLILSGELDGLPEQAFYLVGNIDEATAKAMNLEMESNLKK

SEQ ID NO: 1438 - protein, 617 aa, Eremothecium gossypii
MAGALENARKEIKRISLEDHNENEYGQIYSVSGPVVVAENMVGCAMYELVKVGHHNLVGEVIRLDGDKATIQVYEETAGVTVGDPVLRTGKPLSVELGPGLMETIYDGIQRPLKAIKEQSQSIYIPRGVDAPALSREVKWAFKPGKLGVGDHISGGDIFGSIFENSLLEDHKILLPPRARGTITWIAPAGEYTVDETVLEVEFDGKKYSYSMFHTWPVRVPRPVTEKLSADYPLLTGQRVLDSLFPCVQGGTTCIPGAFGCGKTVISQSLSKYSNSDAIIYVGCGERGNEMAEVLMEFPELFTEVNGRKEPIMKRTTLVANTSNMPVAAREASIYTGITLAEYFRDQGKNVSMIADSSSRWAEALREISGRLGEMPADQGFPAYLGAKLASFYERAGKAVALGSPDRVGSVSIVAAVSPAGGDFSDPVTTSTLGITQVFWGLDKKLAQRKHFPSINTSVSYSKYTNVLNKYYDSNYPEFPVLRDRIKEILSNAEELEQVVQLVGKSALSDKDKIVLDVATLIKEDFLQQNGYSTYDAFCPIWKTYDMMKAFVSYFDEAQKSVSNGANWAVLSEATGDVKHAVSSSKFFEPSRGEREVHAEFEKLFASIQERFAESTD

SEQ ID NO: 1439 - protein, 484 aa, Cobaea scandens
GDSVLEKKNQGRVIQIIGPVLDVAFPPGKMPNIYNALVVKGRDTVGQPINVTCEVQQLLGNNRVRAVAMSATDGLTRGMEVIDTGAALSVPVGGATLGRIFNVLGEPVDNLGPVDNRTTSPIHKSAPAFIQLDTKLSIFETGIKVVDLLAPYRRGGKIGLFGGAGVGKTVLIMELINNIAKAHGGVSVFGGVGERTREGNDLYMEMKESGVINEQNIAESKVALVYGQMNEPPGARMRVGLTALTMAEYFRDVNEQDVLLFIDNIFRFVQAGSEVSALLGRMPSAVGYQPTLSTEMGSLQERITSTKEGSITSIQAVYVPADDLTDPAPATTFAHLDATTVLSRGLAAKGIYPAVDPLDSTSTMLQPRIVGEEHYEIAQRVKQTLQRYKELQDIIAILGLDELSEEDRLTVARARKMERFLSQPFFVAEVFTGSPGKYVGLAETIRGFQLILSGEFDSLPEQAFYLVGNIDEATAKAMNLEMES

SEQ ID NO: 1440 - protein, 227 aa, Mesorhizobium loti
MTPELVIFDCDGVLVDSEALSVSALLGMIERAGGTVSEDAAYEHFLGKSMKSVREILGRDFGLEISDQHLTAMRVDLMRKFREELKPIPGVKEMLPKLGLPFCVASSGTLERIRYALDVTGLLGLMEPHLFSAAMVAKGKPAPDLFLHAAASMRAHPRKCLVIEDSPAGVAAARAAGMRVLAFTGGAHAGNPALKARLASSEPDFIFADMLQLPDLIAGLGARVRAS

SEQ ID NO: 1441 - protein, 1022 aa, Saccharomyces cerevisiae
  unsure (1)..(1022): unsure at all Xaa locations
GAIYSVSGPVVIAENMIGCAMYELVKVGHXNLVGEVIRIDGDKATIQVYEETAGLTVGDPVLRTGKPLSVELGPGLMETIYDGIQRPLKAIKEESQSIYIPRGIDTPALDRTIKWQFTPGKFQVGDHISGGDIYGSVFENSLISSHKILLPPRSRGTITWIAPAGEYTLDEKILEVEFDGKKSDFTLYHTWPVRVPRPVTEKLSADYPLLTGQRVLDALFPCVQGGTTCIPGAFGCGKTVISQSLSKYSNSDAIIYVGCFAKGTNVLMADGSIECIENIEVGNKVMGKDGRPREVIKLPRGRETMYSVVQKSQHRAHKSDSSREVPELLKFTCNATHELVVRTPRSVRRLSRTIKGVEYFEVITFEMGQKKAPDGRIVELVKEVSKSYPISEGPERANELVESYRKASNKAYFEWTIEARDLSLLGSHVRKATYQTYAPILYENDHFFDYMQKSKFHLTIEGPKVLAYLLGLWIGDGLSDRATFSVDSRDTSLMERVTEYAEKLNLCAEYKDRKEPQVAKTVNLYSKVVRGNGIRNNLNTENPLWDAIVGLGFLKDGVKNIPSFLSTDNIGTRETFLAGLIDSDGYVTDEHGIKATIKTIHTSVRDGLVSLARSLGLVVSVNAEPAKVDMNGTKHKISYAIYMSGGDVLLNVLSKCAGSKKFRPAPAAAFARECPGFYFELQELKEDDYYGITLSDDSDHQFLLANQVVVHNCGERGNEMAEVLMEFPELYTEMSGTKEPIMKRTTLVANTSNMPVAAREASIYTGITLAEYFRDQGKNVSMIADSSSRWAEALREISGRLGEMPADQGFPAYLGAKLASFYERAGKAVALGSPDRTGSVSIVAAVSPAGGDFSDPVTTATLGITQVFWGLDKKLAQRKHFPSINTSVSYSKYTNVLNKFYDSNYPEFPVLRDRMKEILSNAEELEQVVQLVGKSALSDSDKITLDVATLIKEDFLQQNGYSTYDAFCPIWKTFDMMRAFISYHDEAQKAVANGANWSKLADSTGDVKHAVSSSKFFEPSRG

SEQ ID NO: 1442 - protein, 130 aa, Vitis vinifera
DSSNTGSVSEANAQFYQQEASKLRRQIRDIQNLNRHILGEALSSLNFKELKNLETRLEKGISRIRSKKNELLFAEIEYMQKREIELQNSNLFLRAQIAENERAQQQMNLMPGSQYESVPQQPYDSQNLLP

SEQ ID NO: 1443 - protein, 477 aa, Tetramerista sp. Coode 7925
LEKKNLGRIVQIIGPVLDVAFSPGKMPNIYNALVVKGRNTVGQPINVTCEVQQLLGNNRVRAVAMSATDGLTRGMEVIDTGAPLSVPVGGATLGQIFNVLGEPVDNLGPVDTRTTSPIHKSAPAFIQLDTKLSIFETGIKVVDLLAPYRRGGKIGLFGGAGVGKTVLIMELINNIAKAHGGVSVFGGVGERTREGNDLYMEMKESGVINEQNFAESKVALVYGQMNEPPGARMRVGLTALTMAEYFRDVNEQDVLLFIDNIFRFVQAGSEVSALLGRMPSAVGYQPTLSTEMGSLQERITSTKEGSITSIQAVYVPADDLTDPAPATTFAHLDATTVLSRGLAAKGIYPAVDPLDSTSTMLQPRIVGEEHYETAQRVKQTLQRYKELQDIIAILGLDELSEEDRLTVARARKIERFLSQPFFVAEVFTGSPGKYVGLAETIRGFQLILSGELDGLPEQAFYLVGNIDEVTAKAMNLE

SEQ ID NO: 1444 - protein, 242 aa, Shigella dysenteriae
LKERKEGAFVPFVTLGDPGIEQSLKIIDTLIEAGADALELGIPFSDPLADGPTIQNATLRAFAAGVTPAQCFEMLALIRQKHPTIPIGLLMYANLVFNKGIDEFYAQCEKVGVDSVLVADVPVEESAPFRQAALRHNVAPIFICPPNADDDLLRQIASYGRGYTYLLSRAGVTGAENRAALPLNHLVAKLKEYNAAPPLQGFGISAPDQVKAAIDAGAAGAISGSAIVKIIEQHFNEPEKML

SEQ ID NO: 1445 - protein, 269 aa, SYNECHOCOCCUS SP. WH 8102
MSSQMLSPIAQRFEQLKHEKRLALMPFLMAGDPDLATTSEVLLSLQNSGADMVELGMPYSDPLADGPVIQAAAARALAAGTTPGKVLEMLTSLKGQLTIPVILFTYSNPLLNVGMEAFCERAAAAGAAGLVVPDLPLEEAERLSPLAEQQGLDLVLLVAPTTPADRMVRIGQRSRGFTYLVSVTGVTGERAQMETRVEGLVEELKQSSAVPVAVGFGISGADQVRQVRSWGADGAIVGSALVKRMAAAGEGQIAEEAGQFCRELRNAAD

SEQ ID NO: 1446 - protein, 471 aa, Sarcomelicope simplicifolia
  unsure (1)..(471): unsure at all Xaa locations
NPGHIAQIIGPVLDVAFPPGKMPNIYNALVVKGRDTVGQPINVTCEVQQLLGNNRVRAVAMSATDGLTRGMEVIDTGAPLSVPVGGTTLGRIFNVLGEPVDNLGPVDTRTTSPIHKSAPAFIQLDTRLSIFETGIKVVDLLAPYRRGGKIGLFGGAGVGKTVLIMELINNIAKAHGGVSVFGGVGERTREGNDLYMEMKESVVINEQNIAESKVALVYGQMNEPPGARMRVGLTALTMAEYFRDVNEQDVLLFIDNIFRFVQAGSEVSALLGRMPSAVGYQPTLSTEMGSLQERITSTKEGSITSIQAVYVPADDLTDPAPATTFAHLDATTVLSRGLAAKGIYPAVDPLDSTSTMLQPRIVGEEHYETAQRVKQTLQRYKELQDIIAILGLDELSEEDRLTVARARKIERFLSQPFFVAEVFTGSPGKYVGLAETIRGFKLILSGELDGLPEQAFYLVGNIDEVTAKAXN

SEQ ID NO: 1447 - protein, 385 aa, Pteridophyllum racemosum
  unsure (1)..(385): unsure at all Xaa locations
LGEPVDNLGPVDTGTTSPIHRSAPAFIQLDTQLSIFETGIKVVDLLAPYRRGGKIGLFGGAGVGKTVLIMELINNIAKAHGGVSVFGGVGERTREGNDLYMEMKESGVINEDNITESKVALVYGQMNEPPGARMRVGLTALTMAEYFRDVNKQNVLLFVDNIFRFVQAGSEVSALLGXMPSAVGYQPTLSTEMGSLQERITSTKAGSITSIQAVYVPADDLTDPAPATTFAHLDATTVLSRGLASKGIYPAVDPLDSTSTMLQPRIVGEKHFETAQRVKQTSQRYKELQDIIAILGLDELSEDDRLTVARARKIERFLSQPFFVAEVFTGSPGKYVSLVETIRGFQLILSGELDDLPEQAFYLVGNIDEATXXAMNFEAENKXKK

SEQ ID NO: 1448 - protein, 489 aa, Columellia oblonga
GSGVSTLEKKNLGRIIQIIGPVLDVAFPPRKMPNIYNALVVKGQDTLGQPINVTCEVQQLLGNNRVRAVAMSATDGLMRGMYVIDTGAPLSVPVGGATLGRIFNVLGEPVDNLGPVDTRTTSPIHRSAPAFIQLDTKLSIFETGIKVVDLLAPYRRGGKIGLFGGAGVGKTVLIMELINNIAKAHGGVSVFGGVGERTREGNDLYMEMKESGVINEENIAESKVALVYGQMNEPPGARMRVGLTALTMAEYFRDVNEQDVLLFIDNIFRFVQAGSEVSALLGRMPSAVGYQPTLSTEMGTLQERITSTKEGSITSIQAVYVPADDLTDPAPATTFAHLDATTVLSRGLAAKGIYPAVDPLDSTSTMLQPWIVGEEHYDIAQRVKQTLQRYKELQDIIAILGLDELSEEDRLTVARARKIERFLSQPFFVAEVFTGSPGKYVGLAETIRGFQLILSGELDGLPEQAFYLVGNIDEATAKAMNLEMESNLK

SEQ ID NO: 1449 - protein, 361 aa, Arabidopsis thaliana
MQLLNSCCGKGFDGKKKEKEEPSWRVFSLKELHAATNSFNYDNKLGEGRFGSVYWGQLWDGSQIAVKRLKEWSNREEIDFAVEVEILARIRHKNLLSVRGYCAEGQERLLVYEYMQNLSLVSHLHGQHSAECLLDWTKRMKIAISSAQAIAYLHDHATPHIVHGDVRASNVLLDSEFEARVTDFGYGKLMPDDDTGDGATKAKSNNGYISPECDASGKESETSDVYSFGILLMVLVSGKRPLERLNPTTTRCITEWVLPLVYERNFGEIVDKRLSEEHVAEKLKKVVLVGLMCAQTDPDKRPTMSEVVEMLVNESKEKISELEANPLFKNPYSSNENNREHVAEESSDVILEDKDHQQQQE

SEQ ID NO: 1450 - protein, 257 aa, Chlamydophila caviae GPIC
MNRIETAFKNTKPFIGYLTGGDGGFDYSVACAHALIRGGVDILEIGFPFSDPVADGPIIQKAHTRALEEKTDSTTILEIAKALRETSNIPLVLFSYYNPLLQKGPQYLHQLKAAGFDAVLIVDLPIPQHANESEPFFQALIEAKLFPIVLATPSTREERLLQIRKLAKGFLYYVSQKGTTGIRSKLSDDFSTQIARLRCYFQIPIVAGFGIANRASAAAALKHADGIVVGSAFVEKLEKKISPEELTTFAQSIDPRQ

SEQ ID NO: 1451 - protein, 486 aa, Myrsine africana
  unsure (1)..(486): unsure at all Xaa locations
MRINPTTSGPGASVLEKKNLGRIIQIIGPVLDVSFSPGKMPNIYNALVVKGRDTAGQPINVTCEVQQLLGNNRVRAVAMSATDGLTRGMEVIDTGAALSVPVGGATLGRIFNVLGEPVDNLGPVDTRTTSPIHRSAPAFIQLDTKLSIFETGIKVVDLLAPYRRGGKIGLFGGAGVGKTVLIMELINNIAKAHGGVSVFGGVGERTREGNDLYMDXXESGVINEENIAESKVALVYGQMNEPPGARMRVGLTALTMAEYFRDVNEQDVLLFMDNIFRFVQAGSEVSALLGRMPSAVGYQPTLSTEMGSLQERITSTKEGSITSIQAVYVPADDLTDPAPATTFAHLDATTVLSRGLAAKGIYPAVDPLDSTSTMLQPRIVGEEHYEIAQRVKQTLQRYKELQDIIAILGLDELSEEDRLTVARARKIERFLSQPFFVAEVFTGSPGKYVGLAETIRGFQLILSGELDGLPEQAFYLVGNIDEATAK

SEQ ID NO: 1452 - protein, 166 aa, Nicotiana tabacum
IERYKKHHADSTSQGSVSESNTQYYQQEAAKLRRQIRDIQTYNRQIVGEALSSLSPRDLKNLEGKLEKAIGRVRSKKNELLFSEIELMQKREIDLQNANMCLRAKIAEVERAQQQMNLMPGGSEYNQQQQPMTTSQNYNDARNFLPVNLLEPNPHYSRHDDQTALQ

SEQ ID NO: 1453 - protein, 265 aa, Bacillus halodurans
MSRLEAAVNGKKNLFIPFITAGDPNPEVTIELALTLEEAGADILELGIPYSDPLADGPVIQAASKRALKHEMTLEKALSLVPKMRAQGLTIPVIVFTYVNPLLQYGEEQFVKRAADYQVDGILVPDMPFEEGEVLQAACQEHNLSLISLVAPTSNKRIEKIAARAQGFVYCVSSLGVTGLRDELDPRVHEFLQTVKTHASVPVVVGFGISRREQVEALAENADGVVVGSAIVKLVGELEDELNDPEKLEDGLFKIKRFVSELISS

SEQ ID NO: 1454 - protein, 467 aa, Clostridium perfringens str. 13
MRRTKLVCTIGPASENEEILTKIIEAGMNASRHNFSHGDHEEHKGRMVKVREISKKLGKEVAILLDTKGPEIRTGKFEPSKVELTAGTEFTIYAGAEDVIGDTTKCSVTYAGLAKDVKAGDTILIDDGLVGLEVVSVEGNAVKCVVRNTGLVGTHKGVNVPGVSIKLPAMTDKDRADLIFGCEMGVNMVAASFIRKAEDVKAIREVLVANGGADIQIFSKIENQEGVDNIDAIIEASDGIMVARGDLGVEIPMEDVPSVQKMIIEKCNNAGKPVITATQMLDSMMRNPRPTRAEVSDVTNAILDGTDAIMLSGESANGSWPVEAVETMVKIATKSEEMLSYELASSKAKKHIPAVPGVISRAACNAAHELKSAAIVSLTQSGATAKRISQCRPDAPIVTVTPNERVAKKVALCFGVYPVVAENATMENAVEIAKNAGFVKANDTAVVVAGVPANEGNTNIVKVEVVK

SEQ ID NO: 1455 - protein, 483 aa, Synechococcus sp. PCC 7002
MVATQEKTLGKITQIIGPVIDAEFPSGKMPRIYNALKIQGKNPYGQEINLTCEVQQLLGDNQVRAVAMSSTDGLVRGMDILDTGAPISVPVGKKTLGRIFNVLGEPVDEKGEVGAEETSPIHRPAPKLTELDTAPSVFETGIKVVDLLTPYRRGGKIGLFGGAGVGKTVIMMELINNIATNHGGVSVFAGVGERTREGNDLYNEMIESGVINPDNLNDSKIALVYGQMNEPPGARMRVGLSGLTMAEYFRDVNKQDVLLFVDNIFRFVQAGSEVSALLGRMPSAVGYQPTLGTDVGDLQERITSTKEGSITSIQAVYVLADDLTDPAPATTFAHLDGTTVLSRALASKGIYPAVDPLDSTSTMLQPSIVGEDHYNTARAVQSTLQRYKELQDIIAILGLDELSEEDRLTVDRARKIERFLSQPFFVAEVFTGSPGKYVTLEETIEGFKRILSGELDDLPEQAFYLVGNIEEAIAKGKKLKEQG

SEQ ID NO: 1456 - protein, 498 aa, Proboscidea louisianica
  unsure (1)..(498): unsure at all Xaa locations
XXXXXXXXXXXXXXXEKKNLGRIVQIIGPVLDVAFPPGKMPNIYNALVVKGRDTVGQPINVTCEVQQLLGNNRVRAVAMSATDGLMRGMEVIDTGAPLSVPVGGATLGRIFNVLGEPVDNLGPVDTRTTFPIHRNAPAFIQLDTKFSIFETGIKVVDLLAPYRRGGKIGLFGGAGVGKTVLIMELINNIAKAHGGVSVFGGVGERTREGNDLYMEMKESGVINEENIAESKVALVYGQMNEPPGARMRVGLTALTMAEYFRDVNEQDVLLFIDNIFRFVQAGSEVSALLGRMPSAVGYQPTLSTEMGSLQERITSTKEGSITSIQAVYVPADDLTDPAPATTFAHLDATTVLSRGLAAKGIYPAVDPLDSTSTMLQPRIVGEEHYETAQRVKQTLQRYKELQDIIAILGLDELSEEDRLTVARARKIERFLSQPFFVAEVFTGSPGKYVGLAETIRGFQLILSGELDGLPEQAFYLVGNIDEATAKAMNLEMESNLKK

SEQ ID NO: 1457 - protein, 758 aa, Taraxacum officinale
MWKLQLSKGDDDPEVRSVNHHMGRQYWEFDPHAGTPEEQSQIESMREEFTRNRLNVTHSSDLLMRFQLTSKNRGGIEKSHVKEEGGDDEVVVKTLKKALKFYSSLQGEDGSWPGDYGGPLFLLPGLIIGLHVMGMKDLVLSIEQQNEIRRYLYNHQNVDGGWGLHIEGNSTMLSTALNYVSLRLLGEELDDGKGAMTKAQSWILKHGSVTHIPSWGKLWLSVLGVYEWRGNNPLPPETWLLPYFLPLHPGRLWCHTRMVYLPMSYLYGKRFVGPISSIVLSLRRELYSTLYYQVNWDLARKQCAKDDLYYPHPLIQDLLWDSLNKIVEPLLMQWPVAKLRKEALKTVMQHIIMRMRTRTIFCIGPVNKVLNMLCCWVEDPKTPINKLHLSRIKDYLWVAEDGMKMQGYNGSQLWDVVFSVQAIVATNLVDEYSSMLHKAHDFIKNSQVKKNSSGNSQSWYRHISRGGWPFSTPDNGWPVSDCTAEALKTVLMLSQMPHDIVGEAIAPECLYDAVNVILSLQNSDGSFATYELTRSYSWLELVNPAETFGDIVIDYPYVECTSAVVQSLRSFTKLYPSHRRIQIETCIEKAIAFIERSQLGDGSWYGSWAICYTYGTWFGIKGLVAGGKTYETSHSIRKACAFLLSKQLHSGGWGESYTSCQQKTYTNLVGNKSHITNTSWALLALIEAGQPRRDRIPLHRAAKVLIDHQLGNGDFPQQEIIGVFNKNCMISYSSYRNIFPIWALGEYLNHVITKKSLG

SEQ ID NO: 1458 - protein, 762 aa, Medicago truncatula
MWKLKIGEGKNEPYLFSTNNFVGRQTWEYDPEAGSEEERAQVEEARKNFYDNRFKVKPCGDLLWRFQVLRENNFMQTIDGVKIEDGEEITYEKATTTLRRGTHHLAALQTSDGHWPAQIAGPLFFMPPLVFCVYITGHLDSVFPREHRKEILRYIYCHQNEDGGWGLHIEGHSTMFCTALNYICMRILGEGPDGGQDNACARARNWIRAHGGVTYIPSWGKTWLSILGLFDWLGSNPMPPEFWILPSFLPMHPAKMWCYCRLVYMPMSYLYGKRFVGPITPLILQLREELHTQPYEKINWTKSRHLCAKEDIYYPHPLIQDLIWDSLYIFTEPLLTRWPFNKLVRKRALEVTMKHIHYEDENSRYLTIGCVEKVLCMLACWVEDPNGDAYKKHLARVQDYLWMSEDGMTMQSFGSQEWDAGFAVQALLAANLNDEIEPALAKGHDFIKKSQVTENPSGDFKSMHRHISKGSWTFSDQDHGWQVSDCTAEGLKCCLLLSMLPPEIVGEKMEPERLYDSVNVLLSLQSKKGGLAAWEPAGAQEWLELLNPTEFFADIVVEHEYVECTGSAIQALVLFKKLYPGHRKKEIENFISEAVRFIEDIQTADGSWYGNWGVCFTYGSWFALGGLAAAGKTYTNCAAIRKAVKFLLTTQREDGGWGESYLSSPKKIYVPLEGSRSNVVHTAWALMGLIHAGQAERDPTPLHRAAKLLINSQLEEGDWPQQEITGVFMKNCMLHYPMYRDIYPLWALAEYRRRVPLPSTAV

SEQ ID NO: 1459 - protein, 336 aa, Beta vulgaris
MRLISTTSAVATLLFLVVILPSIQLTEAQIGVCNGRLGNNLPSEEDVVSLYKSRGITRMRIYDPNQRTLQAVRGSNIGLIVDVPKRDLRSLGSDAGAASRWVQNNVVPYASNIRYIAVGNEIMPNDAEAGSIVPAMQNVQNALRSANLAGRIKVSTAIKSDLVANFPPSKGVFTSSSYMNPIVNFLKNNNSPLLANIYPYFSFIGTPSMRLDYALFTSPNAQVNDNGLQYQNVFDALVDTVYAALAKAGAPNVPIVVSESGWPSAGGNAASFSNAGTYYKGLIGHVKQGTPLKKGQAIEAYLFAMFDENQKGGGIENNFGLFTPNKQPKYQLNFNN

SEQ ID NO: 1460 - protein, 356 aa, Arabidopsis thaliana
MKPVFCGNFEYDARESDLERLFRKYGKVERVDMKAGFAFVYMEDERDAEDAIRALDRFEYGRTGRRLRVEWTKNDRGGAGRSGGSRRSSSGLRPSKTLFVINFDAQNTRTRDLERHFEPYGKIVNVRIRRNFAFIQYEAQEDATRALDATNSSKLMDKVISVEYAVKDDDSRGNGYSPERRRDRSPDRRRRSPSPYRRERGSPDYGRGASPVAHKRERTSPDYGRGRRSPSPYKRARLSPDYKRDDRRRERVASPENGAVRNRSPRKGRGESRSPPPYEKRRESRSPPPYEKRRESRSPPPYEKRRERSRSRSKSSPENGQVESPGQIMEVEAGRGYDGADSPIRESPSRSPPAEE

SEQ ID NO: 1461 - protein, 487 aa, Maripa glabra
MRINPTTSGSEVFAVEKKNLGRIVQIIGPVLDVTFPPGKMPNIYNALVVQGRDNNVTCEVQQLLGNNRVRAVAMSDTDGLMRGMEVIDTGAPISVPVGGATLGRIFNVLGEPVDNLGPVDTNTTSPIHRSAPAFIQLDTKLSIFETGIKVVDLLAPYRRGGKIGLFGGAGVGKTVLIMELINNIAKAHGGVSVFGGVGERTREGNDLYMEMKESRVINEENIAESKVALVYGQMNEPPGARMRVGLTALTMAEYFRDVNEQDVLLFIDNIFRFVQAGSEVSALLGRMPSAVGYQPTLSTEMGSLQERITSTKEGSITSIQAVYVPADDLTDPAPATTFAHLDATTVLSRGLAAKGIYPAVDPLDSTSTMLQPRIVGEEHYETAQRVKQTLQRYKELQDIIAILGLDELSEEDRLTVARARKIERFLSQPFFVAEVFTGSPGKYVGLAETIRGFQLILSGELDGLPEQAFYLVGNIDEATAKAMNLKT

SEQ ID NO: 1462 - protein, 253 aa, Chlamydia trachomatis
MSKLTQVFKQTKPCIGYLTAGDGGTSYTIEAAKALIQGGVDILELGFPFSDPVADNPEIQVSHDRALAENLTSETLLEIVEGIRAFNQEVPLILYSYYNPLLQRDLDYLRRLKDAGINGVCVIDLPAPLSHGEKSPFFEDLLAVGLDPILLISAGTTPERMSLIQEYARGFLYYIPYQATRDSEVGIKEEFRKVREHFDLPIVDRRDICDKKEAAHVLNYSDGFIVKTAFVHQTTMDSSVETLTALAQTVIPG

SEQ ID NO: 1463 - protein, 295 aa, Cyanidioschyzon merolae
MKMSVQTSQQTVNLQTEFKQTQIQEVLDDLDRELIGLQTVKTRIREIAALLLVDRLRQKLGLSSSNPGLHMSFTGSPGTGKTTVARKMADILYRLGYIKKGHLITVTRDDLVGQYIGHTAPKTKQVLKNAMGGVLFIDEAYYLYRPDNERDYGAEAIEILLQVMENQRDDLVIIFAGYKDKMDRFYTSNPGLASRVANHVNFPDYTPEGLLMIGKIMLQEQQYQMTPEAEKVFLQYIQRRMEQPHFANARSVSNALDRARLRQANRIFATPGKKLTKFDLVTIQAEDILKSRLFQ

SEQ ID NO: 1464 - protein, 498 aa, Populus tremuloides
MRINPTTSGPGVSALEKKNLGHIAQIIGPVLDVVFPPGKMPNIYNALVVKGRDTVSQQINVTCEVQQLLGNNRVRAVAMSATEGLMRGMEVIDTGAPLSVPVGGATLGRIFNVLGEPVDDLRPVDTGTTSPIHRSAPAFIQLDTKLSIFETGIKVVDLLAPYRRGGKIGLFGGAGVGKTVLIMELINNIAKAHGGVSVFGGVGERTREGNDLYMEMKESGVINEENIAESKVALVYGQMNEPPGARMRVGLTALTMAEYFRDVNEQDVLLFIDNIFRFVQAGSEVSALLGRMPSAVGYQPTLSTEMGTLQERITSTKEGSITSIQAVYVPADDLTDPAPATTFAHLDATTVLSRGLAAKGIYPAVDPLDSTSTMLQPQIVGEEHYETAQRVKQTLQRYKELQDIIAILGLDELSEEDRLTVARARKIERFLSQPFFVAEVFTGSPGKYVGLAETIRGFKLILSGELDSLPEQAFYLVGNIDEATAKATNLEMENNLKK

SEQ ID NO: 1465 - protein, 463 aa, Glycine max
MDKKEHIAIFTTASLPWLTGTAVNPLFRAAYLAKSGERDVTLVIPWLSLKDQRLVYPNNITFASPSEHEKYICQWLEERVGFTSGFSIQFYPGKFSRDKRSILAVGDISEIIPDKVADIAVLEEPEHLTWYHHGKRWKTKFRLVIGIIHTNYLEYVKREKNGVMQAFLLKYLNNWVVSIYCHKVIRLSAATQDYTGSIICNVHGVNPKFLEIGNTAARRRQKGEHAFTKGAYFIGKMIWSKGYKELLQLLKDHEKELSALEVDLFGSGEDSDEVQKAAEKLELAVRVHPARDHADALFHDYKLFLNPSTTDVVCTTTAEALAMGKIVVCANHPSNDFFKQFPNCWTYDDDDGFVKLTLKALAEQPAQPTDAQRHDLSWEAATKRFLKAADLDKPLERKLSRTTSNFLAASLNLQEKVDEASAYVHHVASGFEVSRRIFGAIPDSLQPDEELRKELGLTDASTK

SEQ ID NO: 1466 - protein, 594 aa, Thermosynechococcus elongatus BP-1
MSNQPLQRRTKIVATIGPAVSHPDKLRAIIQAGATTLRLNFSHGTHDDHQRSIRLIRQISYELGQPVGILQDLQGPKIRLGRFEHGSISLKRGDRFTLTSRPILGNQHISSITYPPLAQEVPAGATILLDDGRVEMLVEEVDKEAGELHCQVIVGGTLSNAKGVNFPGVYLSIKALTEKDREDLMFGLNQGVDWVALSFVRNPQDVLEIKELIANAGKQVPVIAKIEKHEAIEQMDAILSLCDGVMVARGDLGVELPAEDVPILQKRLIAAANRLGIPVITATQMLDSMVKSPRPTRAEISDVANAILDGTDAVMLSNETAMGEYPVEAVKMMATIAARIDNQPQLRQPPGAESTAVRSIPSAISQAVGQVAAQLHAKAIITQTKTGATARNVSKFRPQIPILAATPHIEVARRLQLVWGVEPLLTLDHPSMRESFQAAINAAQERGFLEEGDLVVMTAGTLQGVSGSTDMIKVELVTSVMGRGCGIGHGSVSGPARVVRQGMPVRTFNRGEILVAERTSAELVEVIRKAAGIITEEDSLTSHAAVLGLRLGIPVIVGVKNATRLIREGTILTMDVERGVVYSGARNGGERSPE

SEQ ID NO: 1467 - protein, 458 aa, Ophioglossum reticulatum
SDRMPNIYNSLVIKGKNPAGQEINVTCEVQQLLGNNRVRAVAMSATDGLTRGMQVFDTGAPLVVPVGESTLGRIFNVLGEPVDELGPVDADETSPIHKPAPAFTQLDTKLSIFETGIKVVDLLAPYRRGGKIGLFGGAGVGKTVLIMELINNIAKAHGGVSVFGGVGERTREGNDLYMEMKESKVINEQNVSESKVALVYGQMNESPGARMRVGLTALTMAEYFRDVNKQDVLLSIDNIFRFVQAGSEVSALLGRMPSAVGYQPTLSTEMGSLQERITSTKEGSITSIQAVYVPADDLTDPAPATTFAHLDATTVLSRGLAAKGIYPAVDPLDSTSTMLQPLIVGEEHYKTAQGVKQTLQRYKELQDIIAILGLDELSEEDRLTVARARKIERFLSQPFFVAEVFTGSPGKYVSLVKTIKGFQMILSGELDNLPEQAFYSVGDIDEAAAKAAISQAGG

SEQ ID NO: 1468 - protein, 478 aa, Durio zibethinus
  unsure (1)..(478): unsure at all Xaa locations
STLEKXNLGRISQIIGPVLDVAFPPGKMPNIYNALVVKGRDTIGQQINVSCEVQQLLGNXRVRAVAMSATDGLMRGMEVINTGAPLSVPVGGATLGRIFNVLGEPVDNLGPVDTRTTSPIHKPAPAFIQLDTKLSIFETGIKVVDLLAPYRRGGKIGLFGGAGVGKTVLIMELINNIAKAHGGVSVFGGVGERTREGNDLYMEMKESGVINEQNLAESKVALVYGQMNEPPGARMRVGLTALTMAEYFRDVNKQNVLLFIDNIFRFVQAGSEVSALLGRMPSAVGYQPTLSTEMGSLQERITSTKEGSITSIQAVYVPADDLTDPAPATTFAHLDATTVLSRGLAAKGIYPAVDPLDSTSTMLQPRIVGKEHYETAQRVKQTLQRYKELQDIIAILGLDEVSEEDRLTVARARKIERFLSQPFFVAEVFTGSPGKYVGLAETIRGFQLILSGELDGLPEQAFYLVGNIDEATAKATNL

SEQ ID NO: 1469 - protein, 490 aa, Catalpa bignonioides
  unsure (1)..(490): unsure at all Xaa locations
INPTTSGSXXXTLEKKNLGRIVQIIGPVXDVAFPPGKMPNIYNALVVKGRDTVGQPINVTCEVQQLLGNNRVRAVAMSATDGLTRGMEVINTGAPLSVPVGGATLGRIFNVLGEAVDNLGPVDTRTTFPIHRSAPAFIQLDTKLSIFETGIKVVDLLAPYRRGGKIGLFGGAGVGKTVLIMELINNIAKAHGGVSVFGGVGERTREGNDLYMEMKESGVINEENIAESKVALVYGQMNEPPGARMRVGLTALTMAEYFRDVNEQDVLLFIDNIFRFVQAGSEVSALLGRMPSAVGYQPTLSTEMGSLQERITSTKEGSITSIQAVYVPADDLTDPAPATTFAHLDATTVLSRGLAAKGIYPAVDPLDSTSTMLQPRIVGEEHYETAQRVKQTLQRYKELQDIIAILGLDELSEEDRLTVARARKIERFLSQPFFVAEVFTGSPGKYVGLAETIRGFQLILSGELDGLPEQAFYLVGNIDEATAKAMNLEM

SEQ ID NO: 1470 - protein, 374 aa, Hevea brasiliensis
MAISSSTSGTSSSFPSRTTVMLLLFFFAASVGITDAQVGVCYGMQGNNLPPVSEVIALYKKSNITRMRIYDPNRAVLEALRGSNIELILGVPNSDLQSLTNPSNAKSWVQKNVRGFWSSVLFRYIAVGNEISPVNRGTAWLAQFVLPAMRNIHDAIRSAGLQDQIKVSTAIDLTLVGNSYPPSAGAFRDDVRSYLDPIIGFLSSIRSPLLANIYPYFTYAYNPRDISLPYALFTSPSVVVWDGQRGYKNLFDATLDALYSALERASGGSLEVVVSESGWPSAGAFAATFDNGRTYLSNLIQHVKGGTPKRPNRAIETYLFAMFDENKKQPEVEKHFGLFFPDKRPKYNLNFGAEKNWDISTEHNATILFLKSDM

SEQ ID NO: 1471 - protein, 538 aa, Hypocrea jecorina
MSQISRTQSIMATTAQEHLETGGRINWLASLNTAFTPARNFRRTSIICTIGPKTNSVEALNKLRDAGLNVARMNFSHGSYEYHQSVIDNVRASVAAHPGRPVAIALDTKGPEIRTGNTAGDVDIPISAGTVMNFTTDEKYATACDTQNMYVDYKNITKVIQPGRVIYVDDGVLAFDVLSIKDDQTVEVRARNNGFISSRKGVNLPNTDVDLPALSEKDKADLRFGVKNNVDMVFASFIRRAQDIKDIRDVLGPEGKQIQIIAKIENRQGLNNFAEILEETDGVMVARGDLGIEIPAAEVFAAQKKMIAMCNIAGKPVICATQMLESMIKNPRPTRAEISDVGNAVTDGADCVMLSGETAKGNYPAESIHEMHEASLKAENTIPYVSHFEEMCTLVKRPVSTVESCAMAAVRASLDLGAGGIIVLSTSGDSARLLSKYRPVCPIFMVTRNPTTSRFSHLYRGVYPFLYPEQKPDFDTVNWQEDVDKRIKWAVTRAIELKTLTAGDTVVVVQGWKGGMGNTNTLRIVRADPDHLGIGQME

SEQ ID NO: 1472 - protein, 275 aa, Nitrosomonas europaea ATCC 19718
MNRIQSVFSQLKSQNRAALIPFITAGDPDATTTVALMHRLTQAGVDLIELGVPFSDPMADGPTIQRSSERALKHHISLKDVFSMVAEFRKTNQSTPVVLMGYANPIEAMGYKDFVQTAGHAGVDGVLVVDYPPEECTEWVRYLKEQNIDPIFLLSPTTPESRIRRVAELARGYVYYVSLKGVTGASHLDLHEVGDKLSQLRSYINIPIGVGFGIRDEQTARRIAEQADAVVIGSRIVEEIEHSPAADLLANVGALVESLRRAIDAKSDHSSITEK

SEQ ID NO: 1473 - protein, 480 aa, Sparrmannia ricinocarpa
TLEKENLGRISQIIGPVLDVAFPPGKMPNIYNALVVKGRVGQQINVTCEVQQLLGNNRVRAVAMSATDGLTRGMEVIDTGAPLSVPVGGATLGRIFNVLGEPVDNLGPVDTRTTSPIHKPAPAFIQLDTKLSIFETGIKVVDLLAPYRRGGKIGLFGGAGVGKTVLIMELINNIAKAHGGVSVFGGVGERTREGNDLYMEMKESGVINEQNLAESKVALVYGQMNEPPGARMRVGLTALTMAEYFRDVNEQDVLLFIDNIFRFVQAGSEVSALLGRMPSAVGYQPTLSTEMGTLQERITSTKEGSITSIQAVYVPADDLTDPAPATTFAHLDATTVLSRGLAAKGIYPAVDPLDSTSTMLQPRIVGEEHYETAQRVKETLQRYKELQDIIAILGLDELSEEDRLTVARARKIERFLSQPFFVAEVFTGSPGKYVGLAETIRGFKLILSGELDGLPEQAFYLVGNIDEATAKATNLEMESK

SEQ ID NO: 1474 - protein, 498 aa, Hydrolea ovata
  unsure (1)..(498): unsure at all Xaa locations
XXXXXXXSGSGVSTLEKKNPGRVVQIIGPVLDVAFPPGKMPNIYNALVVQGRDSLGQPINVTCEVQQLLGNNRVRTVAMSATDGLTRGMEVIDTGAAISVPVGGSTLGRIFNVLGEPVDDLGPVDASTTSPIHRSAPAFIQLETKLSIFETGIKVVDLLAPYRRGGKIGLFGGAGVGKTVLIMELINNIAKAHGGVSVFGGVGERTREGNDLYKEMKESKVINEENIEESKVALVYGQMNEPPGARMRVGLTALTMAEYFRDVNKQDVLLFIDNIFRFVQAGSEVSALLGRMPSAVGYQPTLSTEMGSLQERITSTKEGSITSIQAVYVPADDLTDPAPATTFAHLDATTVLSRGLAAKGIYPAVDPLDSTSTMLQPRIVGDEHYQTAQKVKQTLQRYKELQDIIAILGLDELSEEDRLTVARARKIERFLSQPFFVAEVFTNSPGKYVGLAETIRGFQSILSGEFDGLPEQAFYLVGNIDEAKEKAIKLEKESNLKK

SEQ ID NO: 1475 - protein, 482 aa, Megacarpaea polyandra
  unsure (1)..(482): unsure at all Xaa locations
GVSTXEKKNLGRIAQIIGPVLDVAFPPGKMPNIYNALVVKGRDILGQEINVTCEVQQLLGNNRVRAVAMSATEGLKRGMDVVDMGNPLSVPVGGATLGRIFNVLGEPVDNLGPVDTRTTSPIHKSAPAFIQLDTKLSIFETGIKVVDLLAPYRRGGKIGLFGGAGVGKTVLIMELINNIAKAHGGVSVFGGVGERTREGNDLYMEMKESGVINEQNLAESKVALVYGQMNEPPGARMRVGLTALTMAEYFRDVNEQDVLLFIDNIFRFVQAGSEVSALLGRMPSAVGYQPTLSTEMGSLQERITSTKKGSITSIQAVYVPADDLTDPAPATTFAHLDATTVLSRGLAAKGIYPAVDPLDSTSTMLQPRIVGEEHYETAQQVKQTLQRYKELQDIIAILGLDELSEEDRLTVARARKIERFLSQPFFVAEVFTGSPGKYVGLAETIRGFKLILSGEFDSLPEQAFYLVGNIDEATAKATNLEM

SEQ ID NO: 1476 - protein, 491 aa, Averrhoa carambola
  unsure (1)..(491): unsure at all Xaa locations
SXSGVSALEKKNLXRIVQIIGPVLDVAFPPGKMPNIYNALVVKGRDTVGQQINVTCEVQQLLGNNRVRAVAMSATDGLMRGMEVIDTGAPLSVPVGGATLGRIFNVLGEPIDNLGPVDTRTTSPIHRSAPAFIQLDTKLSIFETGIKVVDLLAPYRRGGKIGLFGGAGVGKTVLIMELINNIAKAHGGVSVFGGVGERTREGNDLYMEMKESGVINEENIAESKVALVYGQMNEPPGARMRVGLTALTMAEYFRDVNEQDVLLFMDNIFRFVQAGSEVSALLGRMPSAVGYQPTLSTEMGSLQERITSTKEGSITSIQAVYVPADDLTDPAPATTFAHLDATTVLSRGLAAKGIYPAVDPLDSTSTMLQPRIVGEEHYETAQRVKQTLQRYKELQDIIAILGLDELSEEDRLTVARARKIERFLSQPFFVAEVFTGSPGKYVGLAETIRGFKLILSGELDGLPEQAFYLVGNIDEATAKATNLETENKLKK

SEQ ID NO: 1477 - protein, 266 aa, Chloroflexus aurantiacus
MSRIAETFARLRAAGRIALMPYLTVGFPERTSTLELVPALEAAGASLFELGIPFSDPLADGTTIQRATQRALENGITIADCIATVAELRARRVAAPLLLMGYYNPLLRYGLERACAALAAAGGDGWIIPDLPLEEADDLRQLAAAHQLDLIMFIAPTTPPARISQITAQASGFLYIVSLTGVTGARQTLAGNLTDLIANVRQQTNLPLVVGFGISQPAHIAEVARIADGAIVGSALIDRLERLPPEDRVSGAAAYIRELLSAVARP

SEQ ID NO: 1478 - protein, 541 aa, Thermoplasma volcanium
MKTKIVATVGPASEDPSILKQMVKNGLSLIRINSAHAEISYVAKIVKEMRDINPDVGVMVDLKGPELRTGTFPGGSLRISKGNKYTIGKEITLNNEKAIGNIQTGDKVLMSDGEVEFTVDSTSPIVLIAENDGVLRDRSRVNVPGRYVEIGSITERDKSFVIEGIKQGVDFFALSFVQNAENVNSLRDFIIENGGNQYIIAKIETKSGLDNIESIVQASDGIMVARGDLGVELPLKEVVMAQKKIIKISHEDGDFTIVATQVLESMVNNAFPTRAEISDITNAIIDNADALMLSEESAIGKYPALAVQTLRDVSDYVENLVDFQSSYTFKGNKIAYSVAKAAKVLSDDINSNGIVALTHTGSTVKMISSLRPKALVYAGTVDDSLSRKLNIYFGVVPLHLKRDSESLSFADLTEYILKSAFFKSGDKIVVTSGDPYFTFGGTNDVRVMAIGEFLGRGYPQGKDAFGTATYGKNGNILISNSKDVPDGNFDAYIFTADVKPSEVKKINGKTAVFKTRLARTINEGERIYIDGNTGIILKYEK

SEQ ID NO: 1479 - protein, 202 aa, Fusobacterium nucleatum subsp. nucleatum ATCC 25586
MKEGRIIKVSGPLVVAEGMEEANVYDVVEVSENKLIGEIIEMRGDKASIQVYEETTGIGPGDVVVTTGSPLSIELGPGMLEQMFDGIQRPLLKIQEAVGDFLLKGVSVPALDREKKWQFTPTMQVGEEVEPGKVIGTVQETEIVLHKIMVPNGVYGKIIDIKEGEFTVDKTICSIETENGVRELNMIQKWPVRKGRPYLRKL

SEQ ID NO: 1480 - protein, 341 aa, Corynebacterium glutamicum ATCC 13032
MDIWSGLDSVPADLQGSVVTIGVFDGLHRGHQSLIGEAKKQAEELGVPCVMVTFDPHPIAVFLPGKEPTRLAPLDYRLNLAAECGVDAALVIDFTKELAGLSAEEYFTTMIVDTLHARSVVVGENFTFGVNGAGTESTMRELGQKFGVNVTIAPLLHDDDQRICSTLVRDYLDQGEVERANWALGRRYAVRGEVVRGAGRGGKELGYPTANLYLPTSVALPADGVYAGWFTITDDREIDKEISRDIDGTMVPGVRYQTAISVGTNPTFGDERRSVEAFILDQEADLYGHHVMVEFVGHLRDMVKFNGVDELLDAMARDVTNARDILAKDKLLLDADTQPSA

SEQ ID NO: 1481 - protein, 237 aa, Cucumis sativus
MFQNQEEKMSDSPQRKMGRGKIEIKRIENTTNRQVTFCKRRNGLLKKAYELSVLCDAEVALIVFSSRGRLYEYANNSVKATIDRYKKASSDSSNTGSTSEANTQFYQQEAAKLRVQIGNLQNSNRNMLGESLSSLTAKDLKGLETKLEKGISRIRSKKNELLFAEIEYMRKREIDLHNNNQMLRAKIAESERNVNMMGGEFELMQSHPYDPRDFFQVNGLQHNHQYPRQDNMALQLV

SEQ ID NO: 1482 - protein, 228 aa, Petunia x hybrida
MGRGKIEIKRIENNTNRQVTFCKRRNGLLKKAYELSVLCDAEIALIVFSTRGRVYEYANNNIKGTIERYKKATAETSNACTTQELNAQFYQQESKKLRQQIQLLQNTNRHLVGEGLSALNVRELKQLENRLERGITRIRSKKHEMILAETENLQKREIQLEQENTFLRSKIAENERLQELSMMPATGQEYNAFQQYFARNMLQLNMMEGGVPSYDPLPAHDKKSLQLE

SEQ ID NO: 1483 - protein, 273 aa, Porphyra purpurea
MIINIHINFFMTTISSVFKKLDKQCALIPFITAGDPDLVSTSKALKILDQHGADIIELGLPYSDPLADGPIIQAASSRALKQSINLNNILDMVNITSSNIVAPIVLFTYYNPVLNLGINNFISAISRAGIKGLLIPDLPIEESDYIISVCKLFNIELIFLLSPTSSIERINKIVEQAPGCIYLVSTTGVTGQKPELTGKLKRLTETIKKMTQKPIILGFGISTAEQIKEIKGWNINGIVIGSAFVKRLSSDFPEEGLRKIKDFCTTAKSIIIS

SEQ ID NO: 1484 - protein, 582 aa, Glycine max
  unsure (1)..(582): unsure at all Xaa locations
MLEKVEEFNTERMMEEFERVTKDAERIQRETLKRILEDNASAEYLLNLGLNGRTDPESFKAFVPLVTHKDLEPYINRIIDGDFSSVLTGKPITTMSLSSGTTQGKPKYVPWNDELFDTTLQIYHTSFAFRNREFPINNGKALGFIYSSKQFKTKGGVXQGTATTNVFRNPGFQHAMKAIQSPLCSPDEVIFVWEFHQFRFRHLLCGLIFREEVQLVSSIFAHSIVYAFRTFEQVWEELCVDIKEGVLNSKVTVPSIREAMSKLLKPDPELANLIHNKCMGLSNWYGLIPELFPNVKYVHGIMTGSMEPYLRKLRHYAGELPLLTSDYGSSEGWIGTNVKPTVPPELATYTVLPQIGYFEFIPLRELEEIKGDASFLCMEPKPVGLTEVKVGEEYEIVITNPAGLYRYRLGDVVKVMGFHNSAPEIKFVRRSNLLLSINIDKNTEKDLQLAVESASQLLAEEKLEVVDYTSHIDLSKEPGHYVIFWEISGEASEEVLGGCCNCLDKSFVDAGYTSSRKVNCIGALELRVVRRGTFQKILEHSLALGAAVSQFKTSRCVGPTNTKVLQILNENVVKNYLSTAFN

SEQ ID NO: 1485 - protein, 812 aa, Streptomyces avermitilis MA-4680
MAQGTVQVTHTGTSRWRRRTGEYASLAAALEAAGDGDVLTVAPGTYRENLVVQRAVTLRGPEGSPGSVRIAPVDGVPLTVRASAVVQDLHVEGQDAAAPAVLVEEGTPELMDVRIVTRSAVGIEVRGGARPTVRRCTVDNPAGIGIAVLDGGGGVFEECEIVAAGQSGVAVRGGGHPRLERCRVHHASGAGLSVTGENSALEAVGCEIYEIKGSGVQATGRATAHLTDCDVHRTTADGVTLDTDAVLTLADCRIHDVPENAVDLRSRSVLTLTRTTVRQFGRNGLSVWDPGTRVDANQCEIFDSTGDYPAVWISDGATAVLEACRVHDVPDALFVLDRGSRADVVDSDLSQVRNTAVSVSDGATAQLDDCRIRDAATGAWFRDHGSGGTLSGCTVDGTQTGVIVTKGADPTIERCTVTSPAEAGFYVSAGGRGSFHNCRVTDSGGYGFHVIDGCRATLKKCRTERCARGGYEFADGGPGAPGGGGAIVEDCTSDESAGLRPPAQATAVETTSQSPGLLGAIPGQRITEHEPHIAAAPEPEQPSRTSKAVLGELDTLVGLESVKREVRALTDMIEVGRRRQQAGLKAASARRHLVFTGSPGTGKTTVARLYGEILASLGVLEKGHLVEVSRVDLVGEHIGSTAIRTQEAFDKARGGVLFIDEAYALSPEDSGRDFGREAIDTLVKLMEDHRDAVVVIVAGYTAEMERFLTVNPGVASRFSRTITFSDYGPEELLRIVEQQAEEHEYRLTPGAGEALLKYFTAIPKGPAFGNGRTARQTFEAMVERHAGRVAQLDEPSTDDLTLLYPEDLPELP

SEQ ID NO: 1486 - protein, 282 aa, Arabidopsis thaliana
MSMSNSLKKLSSCVLIDLDGTLINTDGVVGDILRKYLCKYGKQWDGRESLKIVGKTPVEAATTIVEDYELPCKVDEFNSEFYPLFSAQMDKIKSLPGANRLIRHLKCHGVPVALASNSSRANIESKISYHEGIENTLPIDPWHIGGPVIKGFGRGSKVLGIPTANLSTKDYADELVEHPSGVYFGWAGLAKRGVFKMVMSIGWNPYFNNKEKTIEPWLLHDFTEDFYGEELRLIIVGYIRPEANFSSLESLIAKIHEDREVAEKALDLPSYAKFKGDPYLTK

SEQ ID NO: 1487 - protein, 448 aa, Bougainvillea glabra
  unsure (1)..(448): unsure at all Xaa locations
FPPGKMPNIYNALVVKGRDTVGQPINVACEVQQLLGNNRVRAVAMSATDGLTRGMEVIDTGAPLSVPVGGATLGRIFNVLGEPVDNLGPVDTRTTSPIHRSAPAFTQLDTKLSIFETGIKVVDLLAPYRRGGKIGLFGGAGVGKTVLIMELINNIAKAHGGVSVFGGVGERTREGNDLYMEMKESGVINEQNIAESKVALVYGQMNEPPGARMRVGLTALTMAEYFRDVNEQDVLLFIDNIFRFVQAGSEVSALLGRMPSAVGYQPTLSTEMGSLQERITSTKEGSITSIQAVYVPADDLTDPAPATTFAHLDATTVLSRGLAAKGIYPAVDPLDSTSTMLQPRIVGEEHYETAQRVKQTLQRYKELQDIIAILGLDELSEEDRLTVARARKIERFLSQPFFVAEVFTGSPGKYVGLSETIRGFQLILSGELDGLPEQAFYLVGNIXE

SEQ ID NO: 1488 - protein, 475 aa, Cneorum pulverulentum
  unsure (1)..(475): unsure at all Xaa locations
VSALANKNLGHIAQIIGPVXDVAFPPGKMPNIYNALVVKSRDTVGQPINVACEVQQLLGNNRVRAVAMSATDGLMRGMEVIDTGAPLSVPVGGATLGRIFNVLGEPVDNLGPIDTRTTSPIHKSAPAFIQLDTKLSIFETGIKVVDLLAPYRRGGKIGLFGGAGVGKTVLIMELINNIAKAHGGVSVFGGVGERTREGNDLYMEMKESGVINEQNIAESKVALVYGQMNEPPGARMRVGLTALTMAEYFRDVNEQDVLLFIDNIFRFVQAGSEVSALLGRMPSAVGYQPTLSTEMGSLQERITSTKEGSITSIQAVYVPADDLTDPAPATTXAHLDATTVLSRGLAAKGIYPAVDPLDSTSTMLQPRIVGEDHYETAQRVKQTLQRYKELQDIIAILGLDELSEEDRLTVARARKIERFLSQPFFVAEVFTGSPGKYVGLAETIRGFKLILSGEXDGLPEQAFYLVGNIDEVTAK

SEQ ID NO: 1489 - protein, 372 aa, Oryza sativa
  unsure (1)..(372): unsure at all Xaa locations
MWRLKVAQGGGALLRSTNGFAGRAVWEFDPDHGTPEDRANVERVRRDFTDHRLRRPESADLLMRMQVCVXXCSSGLIIIVALEKDTEQVTEETVMASLRRALDEFSSLQADDGHWPGDLSGAIFIMPVLIFSLYATGSLDTVISSEHRREICRYIYNHQNEDGGWGMLILGSSTMFATCLNYVTLRLIGEEPSNEXXLARGHAWIISHGGATLVPQWGKICLSIIGVYEWSGNNPIFPELWLAPQFLPFHPGKFWGPTRVVYVPMAYLYGKKFVGPITPTILALREEIYTDPYHTIDWAQACNACSKEDLVCPRTLLQNVVWTSLYKWVEPVLGSRPMNKLRERALDRLMEHIHYEDENSQYLCLCPVNKVX

SEQ ID NO: 1490 - protein, 297 aa, Triticum aestivum
AAAASTTACAAACCTNSRYLSLASSSSGVLSTVTSSAAGWVLIGAASLLSDCAISAAAPLGIDRCAAYAGFNSTLRQGNITHHEYIQVGKGRDVGLNQIALFEGKVAGGNGEQVLSRDVYRLGQLFDFFRMLTFFYTTVGYYVCTMMTVLTVYIFLYGRVYLALSGLDHSISRQARFLGNTALDAALNAQFLVQIGVFTAVPMIMGFILELGLMKAIFSFITMQLQFCSVFFTFSLGTRTHYFGRTILHGGAKYRATGRGFVVRHIKFADNYRLYSRSHFVKALEVALLLIVYIAYG

SEQ ID NO: 1491 - protein, 101 aa, Triticum aestivum
LRLLVTLGANVIEVGMQVCEPYSDGHVIQAFVERSLSGGVSTDAAMAMLKEVTPELSCPVVSLSDFNPIARRVTGSLTARSREAGVQGAVHSTIYKGRHDG

SEQ ID NO: 1492 - protein, 291 aa, Odontella sinensis
MSSMDTSVNLQEEYNKTEIAKILNLLNEELVGLVPVKSRIREIAALLLIDKLRKNLGITAGSPGLHMSFTGSPGTGKTTVGLKMSDILFQLGYIKKGHLLTVTRDDLVGQYIGHTAPKTKEVLKKAMGGVLFIDEAYYLYKPDNERDYGSEAIEILLQVMENQRDDLVVILAGYKEPMDKFYESNPGLSSRIANHIDFPDYTVEELLKISKMMLEEQQYQLTTQAEVALTQYIAKRKEKPLFANARSVKNALDRARMRQANRIFDSRGQILTKKELVNIEAEDILQSTIFD

SEQ ID NO: 1493 - protein, 442 aa, Pseudomonas putida KT2440
MPSSCVASLPDWIDRMTDTRNGEDSGKLLYCSFCGKSQHEVRKLIAGPSVFICDECVDLCNDIIREEVQEAQAESSAHKLPSPKEISGILDQYVIGQERAKKVLAVAVYNHYKRLNQRDKKGDEVELGKSNILLIGPTGSGKTLLAETLARLLNVPFTIADATTLTEAGYVGEDVENIIQKLLQKCDYDVEKAQMGIVYIDEIDKISRKSDNPSITRDVSGEGVQQALLKLIEGTVASVPPQGGRKHPQQEFLQVDTRNILFICGGAFSGLEKVIQNRSTKGGIGFGAEVRSKEEGKKVGESLREVEPDDLVKFGLIPEFVGRLPVLATLDELDEAALMQILTEPKNALTKQYAKLFEMESVDLEFRSDALKAVARKALERKTGARGLRSILEGVLLDTMYEIPSKKDVSKVVIDESVIEGTSQPLMIYENSEPQAKAAPDA

SEQ ID NO: 1494 - protein, 242 aa, Cyanidium caldarium
MFIAYLTAGAPDLNTTKQALLNLANDGADVIEIGVPYSDPLADGMILQKASQQALKNGFRLEQLWHLLAEIELPVPVVILAYYNQIFHYGVEKWVTTLVNLKVKALIVPDLPYEEAAILRAACARHHLHMIWLISPTLPKVRAKQLALACDDWIYLVSRTGVTGVDAHFDNQIPNMIAELKQVTTTPIALGFGIHQKQQLQLVKSWGADGVIIGTACMQILLEKGVDQLTEWISAMKKSSYP

SEQ ID NO: 1495 - protein, 348 aa, Phaseolus vulgaris
QIGVCYGMMGNNLPSANEVINLYRSNNIRRMRLYDPNGAALGALRNSGIELILGVPNSDLQGLATNADTARQWVQRNVLNFWPSVKIKYIAVGNEVSPVGGSSWYAQYVLPAVQNVYGAVRAQGLHDGIKVSTAIDMTLIGNSYPPSQGSFRGDVRSYLDPIIGYLLYASAPLHVNVYPYFSYSGNPRDISLPYALFTSPNVVVRDGQYGYQNLFDAMLDSVHAAIDNTRIGYVEVVVSESGWPSDGGFGATYDNARVYLDNLVRRAGRGSPRRPSKPTETYIFAMFDENQKSPEIEKHFGLFKPSKEKKYPFGFGAQRMQRLLLMSSMQHIPLRVTCKLEPSSQSLL

SEQ ID NO: 1496 - protein, 268 aa, Salmonella typhimurium
MERYENLFAQLNDRREGAFVPFVTLGDPGIEQSLKIIDTLIDAGADALELGVPFSDPLADGPTIQNANLRAFAAGVTPAQCFEMLAIIREKHPTIPIGLLMYANLVFNNGIDAFYARCEQVGVDSVLVADVPVEESAPFRQAALRHNIAPIFICPPNADDDLLRQVASYGRGYTYLLSRSGVTGAENRGALPLHHLIEKLKEYHAAPALQGFGISSPEQVSAAVRAGAAGAISGSAIVKIIEKNLASPKQMLAELRSFVSAMKAASRA

SEQ ID NO: 1497 - protein, 533 aa, Hordeum vulgare subsp. vulgare
VNVKGNYVQVYVMLPLDAVSVNNRFEKGDELRAQLRKLVEAGVDGVMVDVWWGLVEGKGPKAYDWSAYKQLFELVQKAGLKLQAIMSFHQCGGNVGDAVNIPIPQWVRDVGTCDPDIFYTDGHGTRNIEYLTLGVDNQPLFHGRSAVQMYADYMTSFRENMKEFLDAGVIVDIEVGLGPAGEMRYPSYPQSHGWSFPGIGEFICYDKYLQADFKAAAAAVGHPEWEFPNDVGQYNDTPERTQFFRDNGTYLSEKGRFFLAWYSNNLIKHGDRILDEANKVFLGYKVQLAIKISGIHWWYKVPSHAAELTAGYYNLHDRDGYRTIARMLKRHRASINFTCAEMRDSEQSSQAMSAPEELVQQVLSAGWREGLNVACENALPRYDPTAYNTILRNARPHGINQSGPPEHKLFGFTYLRLSNQLVEGQNYANFKTFVDRMHANLPRDPYVDPMAPLPRSGPEISIEMILQAAQPKLQPFPFQEHTDLPVGPTGGMGGQAEGPTCGMGGQVKGPTGGMGGQAEDPTSGMGGELPATM

SEQ ID NO: 1498 - protein, 498 aa, Hanguana malayana
MRDNPTTSSPAVSTLEEKNLGRIAQIIGPVLDVVFPPGKMPNIYNALVVKGRDTVGQQINVTCEVQQLLGNNRVRAVAMSATDGLMRGMEVIDTGAPLSVPVGGATLGRIFNVLGEPIDDLGPVDTRTTSPIHRSAPAFIQLDTKLSIFETGIKVVDLLAPYRRGGKIGLFGGAGVGKTVLIMELINNIAKAHGGVSVFGGVGERTREGNDLYMEMKESGVINEKNLAESKVALVYGQMNEPPGARMRVGLTALTMAEYFRDVNEQDVLLFIDNIFRFVQAGSEVSALLGRMPSAVGYQPTLSTEMGSLQERITSTKEGSITSIQAVYVPADDLTDPAPATTFAHLDATTVLSRGLAAKGIYPAVDPLDSTSTMLQPRIVGEEHYETAQRVKQTLQRYKELQDIIAILGLDELSEEDRLTVARARKIERFLSQPFFVAEVFTGSPGKYVGLAETIRGFQLILSGELDSLPEQAFYLVGNIDEATAKAMNLEVESKLKK

SEQ ID NO: 1499 - protein, 434 aa, Brucella suis 1330
MSNFSPREIVSELDRFIIGQKDAKRAVAIALRNRWRRQQLEGQMREEVMPKNILMIGPTGVGKTEISRRLAKLAGAPFVKVEATKFTEVGYVGRDVEQIIRDLVEIAITLVREKRREDVKAKAHLNAEERVLDALVGKTASPATRDSFRKKLRNGEMDDKEIEIEVSDSGASPNFEIPGMPGANIGVLNISDMLGKAMGGRTKTRKTTVKDSYPILINDESDKLLDQDQIVQEALRVSEDEGIVFIDEIDKIAAREGGSGAGVSREGVQRDLLPLVEGTTVATKYGPVKTDHILFITSGAFHVSKPSDLLPELQGRLPIRVELSALTREDFRRILTETEASLIKQYIALMETEEVKLEFSDDAIDALADIAVDLNATVENIGARRLQTVMEKVLDEISFTAPDKAGATFIIDAAYVKEKIGGLAKNTDLSRFIL

SEQ ID NO: 1500 - protein, 465 aa, Buchnera aphidicola str. Bp (Baizongia pistaciae)
MITGKIVQIIGAVVDVEFSQQSVPKIFNALKVDNQGSILILEVQQQLGSGIVRTIAMGSSNGLKRGLLVVDLEHGIKVPVGTATLGRIVNVLGQPIDMKGPLKNHDNSDIEYWEIHRKAPSYSEQLTSYEVLETGIKVIDLICPFSKGGKVGLFGGAGVGKTVNMMELIRNIATEHSGYSVFTGVGERTREGNDFYHEMSDSRVLDKVSLVYGQMNEPPGNRLRVAFTGLTIAEKFRNEGHDVLLFIDNIYRYTLAGTEVSALLGRIPSAVGYQPTLSEEMGVLQERITSTNKGSITSIQAVYVPADDLTDPSPATTFSHLDSTITLSRQIVSLGIYPAIDPLNSTSRQLDPRIVGQLHYDVALGVRSILQRYQELKDIIAILGMDELSEDDKILVSRARKIQKFLSQPFFVAEIFTGFSGKYVKLQDTINGFKDIIEGKVDHVPEQAFYMVGSINEVIEKSKKL

SEQ ID NO: 1501 - protein, 491 aa, Lachnocaulon anceps
  unsure (1)..(491): unsure at all Xaa locations
TSSSGVSTIEEKNKGSIIQIIGPVLDVNFPSGKLPNIYNALVVKGRDTVGHQINVTCEVQQLLGNNRVRAVAMSATDGLTRGMEVIDTGAPLSVPVGGATLGRIFNVLGXPIDNLGPVDTSATSPIHRSAPAFIQLDTRLSIFETGIKVVDLLAPYRRGGKIGLFGGAGVGKTVLIMELINNIAKAHGGVSVFGGVGERTREGNDLYMEMKESGVINENNLAESKVALVYGQMNEPPGARMRVGLTALTMAEYFRDVNEQDVLLFIDNIFRFVQAGSEVSALLGRMPSAVGYQPTLSTEMGSLQERITSTKEGSITSIQAVYVPADDLTDPAPATTFAHLDATTVLSRGLAAKGIYPAVDPLDSTSTMLQPRIVGDEHYEIAQRVKETLQRYKELQDIIAILGLDELSEEDRLIVARARKIERFLSQPFFVAEVFTGSPGKYVGLAETIRGFQLILSGELDSLPEQAFYLVGNIDEVTAKAMNLEVESKSK

SEQ ID NO: 1502 - protein, 474 aa, Agrobacterium vitis
MFIRSNRRAKIVATVGPASSSPAILRSLFLAGVDTFRLNFSHGSRDDHAAAYRHIRALEKELGTSIGILQDLQGPKIRIGVLHEGRLQLTKDAEIRFVCGTEPGRGLMDIPLPHREIFAAVKPGDDLLIDDGRVRVRALGVSDEFIDAKVIVAGPISNRKGVNLPGTVLDISPLTPKDRKDLEFGLELGVDWIALSFVQTARDMIEARSLVSDRAGLIAKIEKPSALDEIDDIVALSDAIMVARGDLGVEIPPEDVPGRQKELIRACRIAAKPVIVATQMLDSMVTSPTPTRAEASDVAGAIYDGADAVMLSAESATGAFPVETVEIMSRIIEKTEKHKFYRPILEATEPQIAHTPPHAVATAAADVALALKAPVIVAFTVSGTTASRISRARPPLPILALTPSEQTARQLGLMWGVVSLLSPTVDTYEQSVDRATQAAVQTGLAEKSDQIVVVTGFPFATAGSTNNLRVTQAG

SEQ ID NO: 1503 - protein, 471 aa, Lycopersicon esculentum
MADKPHQVFEVYGESKCFDDDGRIKRTGSVWTASAHIITAVIGSGVLSLAWATAQLGWVAGPTVLLLFSFVTYYTSALLSDCYRTGDPVTGKRNYTYMDAVRANLGGFQVKICGVIQYANLFGVAIGYTIASSISMVAVNRSNCFHKQGHHAACNVSSTPYMIMFGVMEIIFSQIPDFDQISWLSIVAAVMSFTYSTIGLGLGVAQVAETGKIEGSLTGISIGTEVTEMQKIWRSFQALGAIAFAYSYSLILIEIQDTLKSPPAEAKTMKRATLISVAVTTVFYMLCGCFGYAAFGDQSPGNLLTGFGFYNPYWLLDIANIAMVVHLVGAYQVYCQPLFAFVEKTAAEWYPDSKIITKEIDVPIPGFKPFKLNLFRLVWRAIFVIITTVISMLMPFFNDVVGILGAFGFWPLTVYFPVEMYIVQKRITKWSARWICLQILSGACLVISIAAAAGSFAGVVSDLKVYRPFQS

SEQ ID NO: 1504 - protein, 488 aa, Oryza sativa
MAGNLLANYVQVNVMLPLDVVTVDNKFEKVDETRAQLKKLTEAGVDGVMVDVWWGLVEGKGPGSYDWEAYKQLFRLVQEAGLKLQAIMSFHQCGGNVGDIVNIPIPQWVRIVGSDDPDIFYTNRGGARNIEYLTLGVDDQPLFHGRTAIQMYADYMKSFRENMAEFLDTGVIVDIEVGLGPAGEMRYPSYPESQGWVFPGIGEFICYDKYLEADFKAEAAKAGHPEWELPDDAGEYNDTPEKTRFFADNGTYVTEKGKFFLTWYSNKLIKHGDKILDEANKVFLGCRVQLAIKISGIHWWYRVPNHAAELTAGYYNLDNRDGYRTIARMLTRHRACVNFTCAEMRDSEQSSEAKSAPEELVQQVLSAGWREGLHVACENALGRYDATAYNTILRNSRPHGINKNGPPEHKLFGFTYLRLSDELLEGQNYSTFKTFVKRMHANLVSATNVDPLEPLQRSMPEMPIGKILQAAHPKLAPFPFDENTDMPV

SEQ ID NO: 1505 - protein, 479 aa, Agrobacterium tumefaciens str. C58 (Cereon)
MKRNRKVKILATLGPASSEEAMIEKLHLAGADLFRINMSHASHDVMRTLIQRIRSVESRNGRPIGILADLQGPKLRVGKFAETKVDLVPGQTFTLDNNDTPGDNTRVFLPHPEILEAVKPGHRLLIDDGKLHLRAEKSDGKSIVTTVVSGTRISDRKGISLPDTLLGVGVLTDKDRVDLDAVLETNEVDWVALSFVQRPEDLAEVRKISRGRVGLMSKIEKPQAVERIEEIIELSDALMVARGDLGVEMPLEAVPGIQKQLTRACRRAGKPVVVATQMLESMITAPVPTRAEVSDVATAVFEGADAIMLSAESASGDYPIEAVSTMASIASTVEQDPYYSNIIYAQRPQPEATGADAISLAARQIAETLKLAAIVTYTSSGTTGLRAARERPQVPIIALSPIIQTARRLSVVWGLHCVVTGDASDLDDMVNRACRIVVSEGFGKPGDRIIISAGVPLGTPGATNMVRIAYIGSDGQSGV

SEQ ID NO: 1506 - protein, 322 aa, Novosphingobium aromaticivorans
MPHRRHHPRARTGPCHRGGQEGRPDHGQGRNHPRQPMRPWRQGHLLGGRTSGGVALMTRLSNAFAKGRPALVTFVTGGDPTPGATDAILDALVEGGADVIELGMPFTDPMADGPAIQLANLRSLGAGTKTADVFRIAADFRARHPEVPLVLMGYANPMVTRGPDWFAAECVKAGVDGVICVDIPPEEDPELGPALRGAGVSLIRLATPTTDAARLPAVLEGSSGFLYYVSVAGITGMQQAAQASIEEAVARIKQSATIPVAVGFGVRTPEQAAAIAKVADGVVVGSALVDLVARHGADAAGPVKELTAALAAAVHSARKEIA

SEQ ID NO: 1507 - protein, 65 aa, Oryza sativa
  unsure (1)..(65): unsure at all Xaa locations
XGELFARETTEQRRKQMNGGLVDTLLINACENLDLRLDFNCDYANTMITITLEDLEAGLKQISKQ

SEQ ID NO: 1508 - protein, 256 aa, Arabidopsis thaliana
MEGITHPIPRTVEEVFSDFRGRRAGLIKALTNDMVKFYQTCDPEKENLCLYGLPNETWEVNLPVEEVPPELPEPALGINFARDGMQEKDWVSLVAVHSDSWLLSVAFYFGARFGFGKNERKRLFQMINELPTIFEVVSGNAKQSKDLSVNNNNSKSKPSGVKSRQSESLTKVAKMSSPPPKEEEEEEDESEDESEDDEQGAVCGACGDNYGTDEFWICCDACEKWFHGKCVKITPAKAEHIKHYKCPTCSNKRARP

SEQ ID NO: 1509 - protein, 490 aa, Hildebrandtia africana
  unsure (1)..(490): unsure at all Xaa locations
MRINPTTSGSEVSAVEKKNLGRIVQIIGPVLDVAFPPGKMPNIYNALVVQGRDNEQMNVACEVQQLLGNNRVRAVAMSDTDGLMRGMEVIDTGAPISVPVGGATLGRIFNVLGEPVDNLGPVDTKTTSXIHRSAPAFIQLDTKLSIFETGIKVVDLLAPYRXGGKIGLFGGAGVGKTVLIMELINNIAKAHGGVSVFGGVGERTREGNDLYMEMKESGVINEENIAESKVALVYGQMNEPPGARMRVGLTALTMAEYFRDVNEQDVLLFIDNIFRFVQAGSEVSALLGRMPSAVGYQPTLSTEMGSLQERITSTKEGSITSIQAVYVPADDLTDPAPATTFAHLDATTVLSRGLAAKGIYPAVDPLDSTSTMLQPRIVGEEHYETAQRVKQTLQRYKELQDIIAILGLDELSEEDRLTVARARKIERFLSQPFFVAEVFTGSPGKYVGLAETIRGFQLILSGELDGLPEQAFYLVGNIDEATAKAMNLKT

SEQ ID NO: 1510 - protein, 496 aa, Glycine max; identical to SEQ ID NO: 244

SEQ ID NO: 1511 - protein, 491 aa, Acorus gramineus
NPTTSGSAVPSLDEKNLGRIVQIIGPVLDVAFPPGKMPNIYNALVVKGRDTAGQPINVTCEVQQLLGNNRVRAVAMSATDGLTRGMEVIDTGAALSVPVGGATLGRIFNVLGEPVDNLGPVDTRTTSPIHRSAPAFIQLDTKLSIFETGIKVVDLLAPYRRGGKIGLFGGAGVGKTVLIMELINNIAKAHGGVSVFGGVGERTREGNDLYMEMKESGVINEEKIEESKVALVYGQMNEPPGARMRVGLTALTMAEYFRDVNEQDVLLFIDNIFRFVQAGSEVSALLGRMPSAVGYQPTLSTEMGSLQERITSTKEGSITSIQAVYVPADDLTDPAPATTFAHLDATTVLSRGLAAKGIYPAVDPLDSTSTMLQPRIVGEEHYETAQRVKQTLQRYKELQDIIAILGLDELSEEDRLTVARARKIERFLSQPFFVAEVFTGSPGKYVGLAETIRGFQLILSGELDGLPEQAFYLVGNIDEATAKAMNLEVES

SEQ ID NO: 1512 - protein, 484 aa, Plumeria obtusa
INPTTSGSGVSTLEKNNLGHIVQIIGPVLDVAFPPGKMPNIYNALVVKGRDTLGQPINVTCEVQQLLGNNRVRAVAMSATDGLMRGMEVIDTGAPLSVPVGGATLGRIFNVLGEPVDNLGPVDARTTSPIHRSAPAFVQLDTKLSIFETGIKVVDLLAPYRRGGKIGLFGGAGVGKTVLIMELINNIAKAHGGVSVFGGVGERTREGNDLYMEMKESGVINEENIAESKVALVYGQMNEPPGARMRVGLTALTMAEYFRDVNEQDVLLFIDNIFRFVQAGSEVSALLGRMPSAVGYQPTLSTEMGSLQERITSTKEGSITSIQAVYVPADDLTDPAPATTFAHLDATTVLSRGLAAKGIYPAVDPLDSTSTMLQPGIVGEEHYETAQRVKQTLQRYKELQDIIAILGLDELSEEDRLTVARARKIERFLSQPFFVAEVFTGSPGKYVGLAETIRGFQLILSGELDGLPEQAFYLVGNIDEATAK

SEQ ID NO: 1513 - protein, 426 aa, Shewanella oneidensis MR-1
MGDNKNNGDSGKLLYCSFCGKSQHEVRKLIAGPSVYVCDECVELCNDIIREEIKEISPKRDNDKLPTPHELRAHLDDYVIGQDRAKKVLSVAVYNHYKRLKNSSPKDGVELGKSNILLIGPTGSGKTLLAETLARSLNVPFTMADATTLTEAGYVGEDVENIIQKLLQKCDYDVEKAQRGIVYIDEIDKISRKSDNPSITRDVSGEGVQQALLKLIEGTVAAVPPQGGRKHPQQEFLQVDTSKILFICGGAFAGLEKVIEQRAHVGSGIGFGAQVKGEKDKATISETLSQVEPGDLVKYGLIPEFIGRLPVVATLTELDEEALVQILSEPKNALTKQYNALFEMEGVELEFREDALKAIAHKAMSRKTGARGLRSIVEGILLDTMYDIPSIDGVVKAVVDESVVNGESAPILIYERNETQVASGEQ

SEQ ID NO: 1514 - protein, 414 aa, Haemophilus somnus 129PT
MTKEKELHCSFCGKEQKEVDKLIAGTSGYICNECIELCHDMLANADDIEEIDEEFQEEEPKLPTPHEIRAHLDDYVIGQDYAKKVLAVAVYNHYKRLRSEKNTSEVELGKSNILLIGPTGSGKTLLAQTLARMLNVPFAMADATTLTEAGYVGEDVENVLQKLLQNCDYDIEKAQQGIIYIDEIDKITRKSENPSITRDVSGEGVQQALLKLVEGTVASIPPQGGRKHPQQEMLRVDTSKILFICGGAFAGLDKIIEKRTNTGGKGIGFGADVRIDEEKVSLTELFKQVEPDDLMKFGLIPEFIGRLPVIAPLSELDEEALVKILTEPKNALTKQYQVLFSLENIELEFTQEALIAMAKKALARKTGARGLRSIVETLLLDTMYDLPSIENLQKVIVEEETVTENKAPVLKFNS

SEQ ID NO: 1515 - protein, 472 aa, Clostridium acetobutylicum
MQKTKMIFTIGPSSDSEEKLKELMNAGMNAARLNFSHGTHEDHKEKIDIIKKLRKELNKNVAIVVDIKGPKIRTHNFENDKAEIKKGQTFTVMCGSEILGNSEKCSVSYDDLYKDVKKGGLLLVDDGLLEFEITDVQDKNIICKAKNNGIISNHKGVNVPGVSIGLPAVTEKDVLDLKFACKMQADLVAASFIRKAEDVSVVRKVLKENGGEDIRVISKIETQEGVDNIDKILELSDGIMVARGDMGVEIPIEDVPSIQKMIIRKCNDAGKIVITATQMLDSMIRNPRPTRAEASDVANAIYDGTDAIMLSGESASGLYPIEAAETMAKIAQKTESQIDYTKALNERKGEIITKISDAISLAACSTAAELKAAAIITATQSGITARMVSKFRPTCPIIAVTPHDDVARRLALNFGITPITSEKVVSTDELISVSIKRALNENLIKKGDLVVVVAGVPVGESGTTNMLKIQYT

SEQ ID NO: 1516 - protein, 532 aa, Agaricus bisporus
MYPVDGIRSQIEWNTTLNVSDAPVPTETTKYHRKTAIIATIGPKINTVEKLTDVRLAGVNIVRMNFSHGTHEYHQSVIDNTRQMIKNDPHGRPVAIALDTKGPEIRTGQTRDGNDYPIKAGDEFIVTTDPKYSDICDNKVLFVDYANLASVTAPGKLIYIDDGIISLLILSIDGMNLHVRALNNGTLSSRKGVNLPKTDVDLPPLSEKDKDDLRFGIRNGVDMIFASFIRRGEDVRQIREVLGPDGASIKIIVKIENEQGVANFDEILKEADGVMVARGDLGIEIPASQVFLAQKMMIAKCNIVGKPVIVATQMLESMTYNPRPTRAEVSDVANAVLDGSDCVMLSGETAKGSYPVQSVLMMAETCLLAETAICYPPLYDDLRAVQARPTETAETVAIAAVAAAAEQDAKALLVLSTSGETARLVSKYRPKIPIITVTRNEQTARQIHLHRGCYPFWYPEPRGVQNHQWQTDVDNRIRFGLRNALALNVIQPGASIIAVQGWKGGLGHTNTLRILTVPTDPADLELQPLGSL

SEQ ID NO: 1517 - protein, 496 aa, Sparganium eurycarpum
MRTNPTTSSPGVSTLEEKNLGRIAQIIGPVLDAVFPPGKMPNIYNALVVKGRDTLGQQINVTCEVQQLLGNNRVRAVAMSATDGLMRGMEVIDTGAPLSVPVGGATLGRIFNVLGEPVDNLGPVDTRTTSPIHRSAPAFIQLDTKLSIFETGIKVVDLLAPYRRGGKIGLFGGAGVGKTVLIMELINNIAKAHGGVSVFGGVGERTREGNDLYMEMKESGVINEKNLAESKVALVYGQMNEPPGARMRVGLTALTMAEYFRDVNEQDVLLFIDNIFRFVQAGSEVSALLGRMPSAVGYQPTLSTEMGSLQERITSTKEGSITSIQAVYVPADDLTDPAPATTFAHLDATTVLSRGLASKGIYPAVDPLDSTSTMLQPRIVGEEHYETAQRVKQTLQRYKELQDIIAILGLDELSEEDRLTVARARKIERFLSQPFFVAEVFTGSPGKYVGLAETIRGFQLILSGELDSLPEQAFYLVGNIDEATAKAMNLEVESNL

SEQ ID NO: 1518 - protein, 395 aa, Marsilea drummondii
PVGEVTLGRIFNVLGEPVDNMGPVESSTTFPIHRPAPAFTQLDTKLSIFETGIKVVDLLAPYRRGGKIGSFGGAGVGKTVLIMELINNIAKAHGGVSVSGGVGERTREGNDLYMEMKESKVINEENISESKVALVYGQMNEPPGARMRVGLTALTMAEYFRDVNKQDVLLFIDNIFRFVQAGSEVSALLGRMPSAVGYQPTLSTEMGTLQERITSTKEGSITSIQAVYVPADDLTDPAPATTFAHLDATTVLSRGLAAKGIYPAVDPLDSTSTMLQPWIVGEEHYETAQGVKQTLQRYKELQDIIAILGLDELSEEDRLTVARARKIERFLSQPFFVAEVFTGSPGKYVSLVETIKGFQMILSGELDNLPEQAFYLVGNIDEATAKAATLQVEGQ

SEQ ID NO: 1519 - protein, 483 aa, Paramelhania decaryana
  unsure (1)..(483): unsure at all Xaa locations
IXTLEKEXLGRISQIIGPVLDVAFPPGKMPNIYNALVVKGRDTVGQQINVTCEVQQLLGNNRVRAVAMSATDGLTRGMEVIDTGAPLSVPVGGATLGRIFNVLGEPVDNLGPVDTRTTSPIHKPAPAFIQLDTKLSIFETGIKVVDLLAPYRRGGKIGLFGGAGVGKTVLIMELINNIAKAHGGVSVFGGVGERTREGNDLYMEMKESGVINEQNLAESKVALVYGQMNEPPGARMRVGLTALAMAEYFRDVNEQDVLLFIDNIFRFVQAGSEVSALLGRMPSAVGYQPTLSTEMGTLQERITSTKEGSITSIQAVYVPADDLTDPAPATTFAHLDATTVLSRGLAAKGIYPAVDPLDSTSTMLQPRIVGEEHYETAQRVKQTLQRYKELQDIIAILGLDELSEEDRLTVARARKIERFLSQPFFVAEVFTGSPGKYVGLAETIRGFKLILSGELDGLPEQAFYLVGNIDEATAKATNLEMES

SEQ ID NO: 1520 - protein, 223 aa, Vitis vinifera
MGRGKIEIKRIENTTNRQVTFCKRRNGLLKKAYELSVLCDAEVALIVFSSRGRVYEYSNNNIKSTIDRYKKASSDSTNGGFTMEINAQYYQQESAKLRQQIQMLQNSNRHLMGDSLASLTVKELKQLENRLERGITRIRSKKHELLLAEIEYLQKREIELENESVYLRTKIAEVERLQQANMVSTHEFNAIQALVSRNFFQPNMIEGGSTGYPLHDKKVLHLG

SEQ ID NO: 1521 - protein, 138 aa, Ipomoea batatas
HAAELTAGFYNVAGRDGYRPIARMLARHHATLNFTCLEMRDSEQPAEAKSAPQELVQQVLSSGWKEYIDVAGENALPRYDATAYNQMLLNVRPNGVNLNGPPKLKMSGLTYLRLSDDLLQTDNFELFKKFVKKMHADL

SEQ ID NO: 1522 - protein, 498 aa, Rhynchoglossum notonianum
  unsure (1)..(498): unsure at all Xaa locations
XXXXXXTSGSGVSTLEKKNLGRIVQIIGPVLDVAFPPGKMPNIYNALVVKGRDTVGQPINVTCEVQQLLGNNRVRAVAMSATDGLMRGMEVIDTGAALSVPVGGATLGRIFNVLGEPVDNLGPVETSTTFPIHRSAPAFIQLDTKLSIFETGIKVVDLLAPYRRGGKIGLFGGAGVGKTVLIMELINNIAKAHGGVSVFGGVGERTREGNDLYMEMKESGVINEENISESKVALVYGQMNEPPGARMRVGLTALTMAEYFRDVNEQDVLLFIDNIFRFVQAGSEVSALLGRMPSAVGYQPTLSTEMGSLQERITSTKEGSITSIQAVYVPADDLTDPAPATTFAHLDATTVLSRGLAAKGIYPAVDPLDSTSTMLQPRIVGEEHYETAQRVKQTLQRYKELQDIIAILGLDELSEEDRLTVARARKIERFLSQPFFVAEVFTGSPGKYVGLAETIRGFQLILSGELDSLPEQAFYLVGNIDEATTKAMNLEMESNLKK

SEQ ID NO: 1523 - protein, 498 aa, Tagetes sp. Nickrent 3061
  unsure (1)..(498): unsure at all Xaa locations
XXXXXXXXXSGVATLDKKNLGRIAQIIGPVLDVTFPPGKMPNIYNALVVKGRDTVGQPINVTCEVQQLLGNNRIRAVAMSATDGLTRGMDVIDTGAPLSVPVGGATLGRIFNVLGEPIDNLGPVDNSTTFPIHRSAPAFIQLDTKLSIFETGIKVVDLLAPYRRGGKIGLFGGAGVGKTVLIMELINNIAKAHGGVSVFGGVGERTREGNDLYMEMKESGVINEQNIAESKVALVYGQMNEPPGARMRVGLTALTMAEYFRDVNEQDVLLFVDNIFRFVQAGSEVSALLGRMPSAVGYQPTLSTEMGSLQERITSTKEGSITSIQAVYVPADDLTDPAPATTFAHLDATTVLSRGLAAKGIYPAVDPLDSTSTMLQPRIVGDEHYETAQQVKQTLQRYKELQDIIAILGLDELSEEDRLTVARARKIERFLSQPFFVAEVFTGSPGKYVGLAETIRGFQLILSGELDGLPEQAFYLVGNIDEATAKAINLEMESNLKK

SEQ ID NO: 1524 - protein, 242 aa, Shigella boydii
LKERKEGAFVPFVTLGDPGIEQSLKIIDTLIEAGADALELGIPFSDPLADGPTIQNATLRAFAAGVTPAQCFEMLALIRQKHPTIPIGLLMYANLVFNKGIDEFYAQCEKVGVDSVLVADVPVEESAPFRQAALRHNVAPIFICPPNADDDLLRQIASYGRGYTYLLSRAGVTGAENRAALPLNHLVAKLKEYNAAPPLQGFGISAPDQVKAAIDAGAAGAISGSAIVKIIEQHINEPEKML

SEQ ID NO: 1525 - protein, 597 aa, Physcomitrella patens
MNPDGVTYFEGLMEVEQISSNLVILEEDYDGWYRSRGELDERMFINGEDSLIGAVSSSSTTSVCGVKRKRDAVTSAGQGRAVSSGASPSSPCGSPESSPAVMGGVAGGSTCKPPPTPVSITMTTAKWLRTVIAPLSAEPSPELERYLRVFERNIASEMKVRANVILGGIFEARKWRGAGEAGTSDSMWGDQRRLEALKLYYKVLGAMCTAESHRLRSEHLPFLPNERFHRCMLACSAELVLASHKTVTMTFPAVLEPAGITAFDLSKVIEGFVRHEETLPRELKRHLNSIEERLLESMAWEKGSSMFNCLAIAKANLAPEINRLKLMAEPMPALDTSKAQQRSPVDTADGRIGGSKVDDPAGESKGGAASPPRQGSMTAVKGNAGATGGSAEQGESASFMSPARGPSAFTAFSSPQKSRAMPPLLLAFASPQRPNPQAGGETCAETCINVFFQKVLKLAAVRIRNLCERLQQSQQVVERVNRALHHALNHETGLFFNRHIDQIILCCVYGICKVSKVNVTFRDIIYHYRKQPQCKPYVFRNVLLDGSVVWRSGKAGQETGDIIRFYNEVFVPSTKSFLLQVGSSAGVAVPKQRWCSL

SEQ ID NO: 1526 - protein, 480 aa, Vibrio parahaemolyticus RIMD 2210633
MTSKLRRTKIVTTLGPSTDKDNVLEEIIKAGANVVRMNFSHGTSEDHIQRAKKVRAIAARLGRQVAILGDLQGPKIRVSTFKDGKITLKVGDKFTLDSDLPKGEGNQESVGLDYKELPQDVSPNDILLLDDGRVQLQVTSVEGNKVHTRVTVGGPLSNNKGINKKGGGLSADALTEKDKADIITAAEIKVDYLAISFPRNGEDMHYARRLARDAGLEAKLVAKVERAETVATSESIDDIILASDVVMVARGDLGVEIGDPELIGVQKKLIRRARSLNRVVITATQMMESMINSPMPTRAEVMDVANAVLDGTDAVMLSGETAAGQYPVETVKSMADVCIGAEKMSEASLSTYRLDRTFETAEETIAMATMYSANHMEGIKAMIALTESGRTALMMSRLSSGLPIFALSRNESTLNRAALYRGVTPVYFDAKCDAGLPTAQAAISSLKDQGYLHEGDLVIITQGDVMDVVGSTNCMRILPV

SEQ ID NO: 1527 - protein, 591 aa, Streptococcus pyogenes MGAS8232
MNQGKIITVSGPLVVASGMQEANIQDICRVGHLGLVGEIIEMRRDQASIQVYEETSGIGPGEPVVTTGCPLSVELGPGLISEMFDGIQRPLDRFQKATDSDFLIRGVAIPSLDRKAKWAFIPKLSVGQEVVAGDILGTVQETAVIEHRIMVPYKVSGTLVAIHAGDFTVTDTVYEIKQEDGSIYQGSLMQTWPVRQSRPVAQKLIPVEPLVTGQRVIDTFFPVTKGGAAAVPGPFGAGKTVVQHQIAKFANVDIVIYVGCGERGNEMTDVLNEFPELIDPNTGQSIMERTVLIANTSNMPVAAREASIYTGITIAEYFRDMGYSVAIMADSTSRWAEALREMSGRLQEMPGDEGYPAYLGSRIAEYYERSGRVRTLGSQEREGTITAIGAVSPPGGDISEPVTQNTLRIVKVFWGLDAPLAQRRHFPAINWLTSYSLYQDDVGSYIDRKQQSNWSNKVTRAMAILQREASLEEIVRLVGLDSLSEQDRLTMAVARQIREDYLQQNAFDSVDTFTSFPKQEAMLTNILTFNEEASKALSLGAYFNEIMEGTAQVRDRIARSKFIPEENLEQIKGLTQKVTKEIHHVLAKGGI

SEQ ID NO: 1528 - protein, 1166 aa, Capsella rubella
MKQKWLFVLILCFFTALGIHGKRLINSDFDETALLMAFKQFSVKSDPNNVLGNWIYESGRGSCSWRGVSCSDDGRIVGLDLRNGGVTGTLNLANLTALPNLQNLYLQGNYFSSSSGGDSSSGSYCYLQVLDLSSNLISDYSLVDYVFSKCSNLVSVNFSNNKLVGKLGFAPSSLKSLTTVDFSYNILSEKIPESFISEFPASLKYLDLTHNNFSGDFSDLSFGMCGNLSFFSLSQNNISGVKFPISLPNCRFLETLNISRNNLAGKIPGGEYWGSFQNLKQLSLAHNRFSGEIPPELSLLCKTLETLDLSGNALSGELPSQFTACVWLQNLNIGNNYLSGDFLSTVVSKITRITYLYVAFNNISGSVPISLTNCTNLRVLDLSSNGFTGNVPSGLCSQQSSPVLEKLLIANNYLSGTVPVELGKCKSLKTIDLSFNELTGPIPKDVWMLPNLSDLVMWANNLTGSIPEGVCVKGGKLETIILNNNLLTGSIPQSISRCTNMIWISLSSNRLTGKIPTGIGNLSKLAILQLGNNSLSGNVPRQLGNCKSLIWLDLNSNNLTGDLPGELASQAGLVMPGSVSGKQFAFVRNEGGTDCRGAGGLVEFEGIRAERLERFPMVHSCPATRIYSGMTMYTFSANGSMIYFDISYNAVSGLIPPGYGNMGYLQVLNLGHNRITGNIPDSLGGLKAIGVLDLSHNDLQGYLPGSLGSLSFLSDLDVSNNNLTGPIPFGGQLTTFPVSRYANNSGLCGVPLRPCGSAPRRPITSSVHAKKQTLATAVIAGIAFSFMCLVMLFMALYRVRKVQKKELKREKYIESLPTSGSCSWKLSSVPEPLSINVATFEKPLRKLTFAHLLEATNGFSAETMVGSGGFGEVYKAQLRDGSVVAIKKLIRITGQGDREFMAEMETIGKIKHRNLVPLLGYCKVGEERLLVYEYMKWGSLETVLHEKSSKKGGIFLNWTARKKIAIGAARGLAFLHHSCIPHIIHRDMKSSNVLLDEDFEARVSDFGMARLVSALDTHLSVSTLAGTPGYVPPEYYQSFRCTAKGDVYSYGVILLELLSGKKPIDPGEFGEDNNLVGWAKQLYREKSGTEILDPELVTEKSGDAELFHYLKIASQCLDDRPFKRPTMIQVMAMFKELKADTEEDESLDEFSLKETPLVEESRDKEP

SEQ ID NO: 1529 - protein, 419 aa, Chlamydia muridarum
MTKKNLAICSFCGRSEKDVEKLIAGPSVYICDYCIKLCSGILDKTPTPAAQEVSTSQTAPQTSLKVLTPKEIKRHIDSYVVGQERAKKTISVAVYNHYKRIRALMQDKQVSYGKSNVLLLGPTGSGKTLIAKTLAKILDVPFTIADATTLTEAGYVGEDVENIVLRLLQAADYDVARAERGIIYIDEIDKIGRTTANVSITRDVSGEGVQQALLKIIEGTVANIPPKGGRKHPNQEYIRVNTENILFIVGGAFVNLDKIIAKRLGRTTIGFSEETDLAVTDRDRLLAKVETEDLIAFGMIPEFIGRFNCIVNCEELTLDELVEILTEPANAIVKQYTELFAEENVKLIFEKEALYAIAQKAKQAKTGARALGMILENLLRDLMFEIPSDPTVESIRIEEDTITQNKSPVIIQRSPEAIA

SEQ ID NO: 1530 - protein, 379 aa, Glycine max
  unsure (1)..(379): unsure at all Xaa locations
QKTKKNPSIPCTSMSSLSTHHTYSRKQKSLGLLCTNFLSLYNKEGVRLIGLDDAASRLGVERRRIYDIVNILESVGXLARKAKNQCTWKGFSAIHVALQELKDEGLKENPGSSDDSNPSINLVLTVLGXDDEDEEETFPNINTGSQNVMVKSSSKNENRREKSLALLTQNFVKLFVCSNFEMISLDEAAKLLLGNANNRTKVRRLYDIANVLSSMNLIEKVXTHTTNTRKPAFRWLGVRGKTWSESAQTNVKESQKRMFGSDITNINFKRKVDLSMDGQNFKTQNQQENISPRAQLEKKSLKKDAKQTSMSYQFGPFAPAYVHKVGTSENNSVKQVQDWESLAQEHRPQYQNQGXALKDLFSHYMEAWKSWYSEAAKTL

SEQ ID NO: 1531 - protein, 480 aa, Medicago sativa
MSLPPPIPPPSLATPPKARPTELPIRQIPGSHGWPLLGPLSDRLDYFWFQKPENFFRTRMDKYKSTVFRTNVPPTFPFFTNVNPNIIAVLDCKSFSHLFDMDLVDKRDVLVGDFVPSVEFTGNIRVGVYQDVSEPQHAKAKNFSMNILKQSSSIWVPELISNLDIFLDQIEATLSNSSSASYFSPLQKFLFTFLSKVLARADPSLDPKIAESGSSMLNKWLAVQLLPTVSVGTIQPLEEIFLHSFSYPYALVSGDYKNLYNFIKQHGKEVIKSGTEFGLSEDEAIHNLLFVLGFNSYGGFSIFLPKLIESIANGPTGLQEKLRKEAREKGGSTLGFDSLKELELINSVVYETLRMNPPVPLQFGRARKDFQLSSYDFAFNVKKGELLCGFQKLVMRDPVVFDEPEQFKPERFTKEKGAELLNYLYWSNGPQTGSPTVSNKQCAGKDIVTFTAALIVAHLLRRYDLIKGDGSSITALRKAK

SEQ ID NO: 1532 - protein, 268 aa, Escherichia coli
MERYESLFAQLKERKEGAFVPFVTLGDPGIEQSLKIIDTLIEAGADALELGIPFSDPLADGPTIQNATLRAFAAGVTPAQCFEMLALIRQKHPTIPIGLLMYANLVFNKGIDEFYAQCEKVGVDSVLVADVPVEESAPFRQAALRHNVAPIFICPPNADDDLLRQIASYGRGYTYLLSRAGVTGAENRAALPLTHLVAKLKEYNAAPPLQGFGISSPDQVKAAIDAGAAGAISGSAIVKIIEQHINEPEKMLAALKAFVQPMKAATRS

SEQ ID NO: 1533 - protein, 324 aa, Azotobacter vinelandii
MAGPSGTGKTLLVRTLARILGVPFAMADATTLTQAGYVGDDVDSIITRLLDAAGGDVQQAQWGIVYIDEVDKLAKRSGGGTAVRDISGEGVQQALLKMVEGTEVRISKSGRRNEHSEEQVVDTRNILFIAGGAFPGLEALVSSRIQPKNTGIGFHAQPRREAPSINELMASLLPDDLHEFGLIPEFIGRFPIITFLQELDHATLLRILTEPRNALVKQYKQLFAYQGVELVITDAALNYIADQALIRKTGARGLRAVLEAALQQTMFNMPSQPQLRGCTLDLVEHEDGGRSLEVLTRLAEDGSGRIQPDPSPVVEEKSALSADL

SEQ ID NO: 1534 - protein, 581 aa, Archaeoglobus fulgidus DSM 4304
MEVKEAGYVGEIYRISGPLVVAEGLKARMYDLCKVGEEGLMGEVVGLVGQKVLIQVYEDTEGVKPGDKVENTGMPLSVELGPGLIRNIYDGVQRPLPVLKEVSGDFIGRGIEAPGLDRKAKWEFKPLVKKGEKVKPGEIIGTVQETEVVEQKILVPPNVKEGVIAEIYEGSFTVEDTIAVLEDGTELKLYHKWPVRIPRPYVEKLPPVVPLITGQRILDTFFPVAKGGTAAIPGPFGSGKTVTQHQLAKWSDAQIVVYIGCGERGNEMTEVLEEFPELEDPRTGKPLMERTVLVANTSNMPVAAREASVYTGITIAEYFRDMGYDVAIQADSTSRWAEAMREISGRLEEMPGEEGYPAYLASRLAEFYERAGRVKTLAGNIGSVTVVGAVSPPGGDFSEPVTQNTLRIVKVFWALDAKLAARRHFPAINWLQSYSLYVDTLKDWFAENVSEEWNELRRWAMEVLQEEANLQEIVQLVGSDALPESQRVLLEVARIIREVYLIQYAYHPVDTYCSVQKQYDMLKAIKQINDWFYQALEAGKTIDEIAGVEGLEEFARAKFEEDYKPAMEAALEKIRKNLLGE

SEQ ID NO: 1535 - protein, 411 aa, Saccharomyces bayanus
EDAWNSQMDDCPSIAVVLNLPRLNIRAYQNWASLRSQTIYRTISGFMNYSRAIKLLYRVENPEIVQMFGGNADGLERELEKMARRKFKFLVSMQRLAKFKPHELENAEFLLRAYPDLQIAYLDEEPPLSEGGEPRIYSALIDGHCEILDNGRRRPKFRIQLSGNPILGDGKSDNQNHALIFYRGEYIQLIDANQDNYLEECLKIRSVLAEFEELGIEPVHPYTPGLKYEDQSNNHPVAIVGAREYIFSENSGVLGDVAAGKEQTFGTLFARTLSQIGGKLHYGHPDFINATFMTTRGGVSKAQKGLHLNEDIYAGMNALLRGGRIKHCEYYQCGKGRDLGFGTILNFTTKIGAGMGEQMLSREYYYLGTQLPIDRFLTFYYAHPGFHLNNLFIQLSLQMFMLTLVNLHALA

SEQ ID NO: 1536 - protein, 709 aa, Glycine max
MAGLIDLNNATEDDEMPSSGSSSTVCLELWHACAGPLISLPKKGSVVVYFPQGHLEQHLHDFPLPASANIPSHVFCRVLDVKLHAEEGSDEVHCQVVLVPETEQVHQKLREGEFDADGEEEDAEAVMKSTTPHMFCKTLTASDTSTHGGFSVPRRAAEDCFPPLDYSQQRPSQELVAKDLHGQEWRFRHIYRGQPRRHLLTTGWSAFVNKKKLVSGDAVLFLRGEDGELRLGIRRAAQLKSGSTFSALSGQQLSPTSLMDVVNALSARCAFSIHYNPRISTSEFIIPIHRFLKSLDYSYSAGMRFRMRFETEDAAERRFTGLIVGIADVDPVRWPGSKWRCLMVRWDDLEVTRHNRVSPWEIEPSGSASTANNLMSAGLKRTKIGLPSAKLEFPVSNVIGTSDFGESLRFQKVLQGQEMLGVNPTYDSINAQSHQVSDLRRCYPVSNYPRIAATGNNIGIPQVSSNVSSNGIGFSESFRFQKVLQGQEIFPSQPYGRALSVDEACGNSRCGLFDGYQVMRSRNGWCSDMSNNSSNLHPPVPSGQVSSPSSVLMFQQAVNLVSNSDYNNKISQVMGGKFHQRVSYASDVKGGKFVSTPYEPLLCGLAKEGTNSFGLSNFHNQLDSSRSHDSISVLRANQELVPSCKSSCRVFGFSLTEVAPIANKEAADSSSVACSGPSFTRHVDDDFHPGHSLRSKAVASYCTKGVLQY

SEQ ID NO: 1537 - protein, 211 aa, Staphylococcus epidermidis ATCC 12228
MYKAVVFDFDGTVIDTEKHLFDLINTHLKIHQVAPISLEFYKQFIGGEATELHTYLEDAIGFKNKEKIYDQYYQTSVELPVNSTIIQLMQYLKKRHIPMAITTSSYKKNIYPIFKQLGLDTYIDVVVGRENVDSVQPNPEIYLKAVQELNYNPTTCLAIEDSVNGATAAMLAGLDVVVNTNIITKDQDFSTVQCVGQDMEFEDIKNSLFKE

SEQ ID NO: 1538 - protein, 542 aa, Shigella flexneri 2a str. 301
MVSALWTVELNDSKTDTHVGLRHKHTFLCTLFRCHLSLERGTTTFVIPDSLSGSAPRKQVSPILLNLKTKTVMKKTKIVCTIGPKTESEEMLAKMLDAGMNVMRLNFSHGDYAEHGQRIQNLRNVMSKTGKTAAILLDTKGPEIRTMKLEGGNDVSLKAGQTFTFTTDKSVIGNSEMVAVTYEGFTTDLSVGNTVLVDDGLIGMEVTAIEGNKVICKVLNNGDLGENKGVNLPGVSIALPALAEKDKQDLIFGCEKGVDFVAASFIRKRSDVIEIREHLKAHGGENIHIISKIENQEGLNNFDEILEASDGIMVARGDLGVEIPVEEVIFAQKMMIEKCIRARKVVITATQMLDSMIKNPRPTRAEAGDVANAILDGTDAVMLSGESAKGKYPLEAVSIMATICERTDRVMNSRLEFNNDNRKLRITEAVCRGAVETAEKLDAPLIVVATQGGKSARAVRKYFPDATILALTTNEKTAHQLVLSKGVVPQLVKEITSTDDFYRLGKELALQSGLAHKGDVVVMVSGALVPSGTTNTASVHVL

SEQ ID NO: 1539 - protein, 236 aa, Oryza sativa
MGRGKIEIKRIENTTNRQVTFCKRRNGLLKKAYELSVLCDAEVALIVFSSRGRLYEYANNSVKSTVERYKKANSDTSNSGTVAEVNAQHYQQESSKLRQQISSLQNANSRTIVGDSINTMSLRDLKQVENRLEKGIAKIRARKNELLYAEVEYMQKREVELQNDNMYLRSKVVENERGQQPLNMMGAASTSEYDHMVNNPYDSRNFLQVNIMQQPQHYAHQLQPTTLQLGQQPAFN

SEQ ID NO: 1540 - protein, 339 aa, Pisum sativum
AQIGICYGMMGNNLPPANEVIALYKANNIKRMRLYDPNQPALNALRDSGIELILGIPNSDLQTLATNQDSARQWVQRNVLNFYPSVKIKYIAVGNEVSPVGGSSWLAQYVLPATQNVYQAIRAQGLHDQIKVTTAIDMTLIGNSFPPSKGSFRSDVRSYLDPFIGYLVYAGAPLLVNVYPYFSHIGNPRDISLPYALFTSPGVMVQDGPNGYQNLFDAMLDSVHAALDNTGIGWVNVVVSESGWPSDGGSATSYDNARIYLDNLIRHVGKGTPRRPWATEAYLFAMFDENQKSPELEKHFGVFYPNKQKKYPFGFGGERRDGEIVEGDFNGTVSLKSDM

SEQ ID NO: 1541 - protein, 591 aa, Streptococcus pneumoniae TIGR4
MTQGKIIKVSGPLVIASGMQEANIQDICRVGKLGLIGEIIEMRRDQASIQVYEETSGLGPGEPVVTTGEPLSVELGPGLISQMFDGIQRPLDRFKLATHNDFLVRGVEVPSLDRDIKWHFDSTIAIGQKVSTGDILGTVKETEVVNHKIMVPYGVSGEVVSIASGDFTIDEVVYEIKKLDGSFYKGTLMQKWPVRKARPVSKRLIPEEPLITGQRVIDAFFPVTKGGAAAVPGPFGAGKTVVQHQVAKFANVDIVIYVGCGERGNEMTDVLNEFPELIDPNTGQSIMQRTVLIANTSNMPVAAREASIYTGITMAEYFRDMGYSVAIMADSTSRWAEALREMSGRLEEMPGDEGYPAYLGSRIAEYYERAGRSQVLGLPEREGTITAIGAVSPPGGDISEPVTQNTLRIVKVFWGLDAPLAQRRHFPAINWLTSYSLYKDSVGTYIDGKEKTDWNSKITRAMNYLQRESSLEEIVRLVGIDSLSDNERLTMEIAKQIREDYLQQNAFDSVDTFTSFAKQEAMLSNILTFADQANHALELGSYFTEIMEGTVAVRDRMARSKYVSEDRLDEIKIISNEITHQIHLILETGGL

SEQ ID NO: 1542 - protein, 402 aa, Cosmocladium perissum
LLGDNRVRAVAMSATDGLMRGMEVLDTGGPLSVPVGEVTLGRIFNVLGEPVDEMGPVNVTATSPIHRSAPAFTQLDTKLSIFETGIKVVDLLAPYRRGGKIGLFGGAGVGKTVLIMELINNIAKAHGGVSVFGGVGERTREGNDLYMEMKESKVINEENLSESKVALVYGQMNEPPGARMRVGLTALTMAEYFRDVNKQDVLLFIDNIFRFVQAGSEVSALLGRMPSAVGYQPTLATEMGGLQERITSTKEGSITSIQAVYVPADDLTDPAPATTFAHLDATTVLSRGLAAKGIYPAVDPLDSTSTMLQPWIVGAEHYDTAQGVKKTLQRYKELQDIIAILGLDELSEDDRLVVARARKIERFLSQPFFVAEVFTGSPGKYVSLAETIKGFQMILSGELDHL

SEQ ID NO: 1543 - protein, 105 aa, Oryza sativa
AKAETIHGLARAGDLAGVQRKLQENPALINDRNPVMSQTPLHVAAGYNNTGIVKFLLDFQGTDKVELEAKNMYGETPLHMAVKNSSCESAKLLLERGAHIEAKAN

SEQ ID NO: 1544 - protein, 475 aa, Kingdonia uniflora
  unsure (1)..(475): unsure at all Xaa locations
GRIVQIIGPVLDVAFSPGKMPXIYNALIVKGRDNVGQKIHMTCEVQQLLGNNRVRAIAMRATDGLMRGMEVIDTGAPLSVPVGGATLGRIFNVLGEPVDNLGPVDTRTTSPIHRSAPAFIELDTKLSIFETGIKVVDHLAPXRRGGKIGLFGGAGVGKTVLIMELINNIAKAHGGVSVFGGVGERTREGNDLYMEMKESGVINEQNIAESKVALVYGQMNEPPGARMRVGLTALTMAEYFRDVNEPNVLLFIDNIFRFVQAGSEVSXLLGRMPSAVGYQPTLSTEMGTXQERXTXTKKGSITSIXAVYVPADDLTDPAPATTFAHLDATTVLSRGLAAKGIYPAVDPLDSTSTMLQPRIVGEEHYETAQRVKQTLQRYKELQDIIAILGLDELSEEDRLTVARARKIERFLSQPFFVAEVFTGSPGKYVGLTETIRGFQLILSGELDSLPEQAFYLVGNIDEATAKAMNXXXESN

SEQ ID NO: 1545 - protein, 135 aa, Triticum aestivum
MPGPGSQNGRASPPKSENIHGLVRAGDVAAVQRKLQENPALLNDKNPVMCQTPLHVAAGYNNTEIVKFLLDWQGQSANRVEVEAKNMYGETPLHMAVKNSSYESTKLLLERGVHTGAKANNGMSPLHLTVWHALQ

SEQ ID NO: 1546 - protein, 411 aa, Lactococcus lactis
MSNTQNPNIQCSFCGKSQDDVKKMIAGSDVYICNECIELSTRILEEELKEEQDSEMLEVKTPKEMFDHLNEYVIGQEKAKRALAVAVYNHYKRINFTASKIAEDIELQKSNILLIGPTGSGKTFLAQTLAKSLNVPFAIADATSLTEAGYVGEDVENILLKLLQASDFNIERAERGIIYIDEIDKIAKKSENVSITRDVSGEGVQQALLKIIEGTVASVPPQGGRKHPNQEMIQIDTKNILFIVGGAFDGIEEIVKQRLGEKIIGFGANNKKLSDEDSYMQEIIAEDIQKFGLIPEFIGRLPIVAALERLTEEDLIQILTEPKNALIKQYKQLLLFDNVELEFKDGALMAIAKKAIERKTGARGLRSIIEEVMMDIMFEVPSHEEITKVIITEAVVDGKAEPEMIREADKK

SEQ ID NO: 1547 - protein, 287 aa, Glycine max
FGSSEYYREVLNRSLRCQHCSRPFIAYDVNMQGTTPATNSSQQAFGAQNHSQNQGAFDVAAGSQGNLHTSRSNTESHNKKGPAADVSVKPNGKRRRKRVAESSESAESVGSTDSESEEDTLYDKDGFSTHRDENPRRSTRQKHQVSYNENVSDDDEGGGSPSGAAENTGEVSKMNNQNGLAADLKGEKQGAKRKQNFYSGESLQNIDEEIKEVRGKEAVGSSKIDKASEHSPSKSTNRPDDFVYPDAEFSDFDKDKKEGSFAVGQIWAIYDTIDGMPRFYAVIRKVF

SEQ ID NO: 1548 - protein, 482 aa, Matisia cordata
  unsure (1)..(482): unsure at all Xaa locations
EKENLGRISQIIGPVLDVAFPPGKMPNIYNAXVVKGRDSAGQQINVTCEVQQLLGNNRVRAVAMSATDGLMRGMEVIDTGAPXSVPVGGATLGRIFNVLGEPVDNLRPVDTRTTSPIHKPAPAFIQLDTKLSIFETGIKVVDLLAPYRRGGKIGLFGGAGVGKTVLIMELINNIAKAHGGVSVFGGVGERTREGNDLYMEMKESGVINEQNLAESKVALVYGQMNEPPGARMRVGLTALTMAEYFRDVNEQDVLLFIDNIFRFVQAGSEVSALLGRMPSAVGYQPTLSTEMGSLQERITSTKEGSITSIQAVYVPADDLTDPAPATTFAHLDATTVLSRGLAAKGIYPAVDPLDSTSTMLQPRIVGEEHYETAQRVKQTLQRYKELQDIIAILGLDELSEEDRLTVARARKIERFLSQPFFVAEVFTGSPGKYVGLAETIRGFKLILSGELDGLPEQAFYLVGNIDEATAKGTNLEMESKLK

SEQ ID NO: 1549 - protein, 313 aa, Caulobacter crescentus CB15
MPLKTVHAWKNLPPEHRGASVALGNFDGVHRGHQQVIAQAAKAALTDKTPLGVISFDPHPRRLFRPSEPAFKLMTQGQQARALAGLGVGVFYLLPFDFEMASFSDREFVEKVLVEGLGVTHVAAGFDISFGRGRTGSPELLRTYGQEYGFTVSIAEPVAGGDGEKFSSTGVRDALRGGQPEQAAAILGRPFAIEGVVRRGQQLGRQLGFPTANVEVEDYVVPKLGVYATRTRLPDGREVPGVANLGNNPTTGLVETRLETWLFDFDEDLYGQIIETDLVAFLRPELKFDSLELMIEQIRRDEQAARAIVAPGF

SEQ ID NO: 1550 - protein, 119 aa, Fusobacterium nucleatum subsp. vincentii ATCC 49256
MKQGIIPELVGRLPVITTLDNLDEQTLINILTKPKNAIVKQYQKLCKLEGVELEFTQEALTEIAKRALKRKMGARGLRAIIEHTMLDIMFELPSQNNIKKITITKETIDNYKKAEIEYK

SEQ ID NO: 1551 - protein, 482 aa, Echiochilon pauciflorum
  unsure (1)..(482): unsure at all Xaa locations
EKNNLGRIVQIIGPVLXVAFPPGKMPNIYNALVVKGRDTXGQPNNVTCEVQQLLGNNRVRAVAMSATXGLTRGMEVIDTGAPXXVPVGGATLGRIFNVLGEPVDNLGPVDTRTTSPIHRSAPAFXQLDTKLSIFETGIKVVDLLAPYRRGGKIGLFGGAGVGKTVLXMELINNIAKAHGGVSVFGGVGERTREGNDLYMEMKESGVINEENIAESKVALVYGQMNEPPGARMRVGLTALTMAEYFRDVNEQDVLLFIDNIFRFVQAGSEVSALLGRMPSAVGYQPTLSTEMGSLQERITSTKAGSITSIQAVYVPADDLTDPAPATTFAHLDATTVLSRGLAAKGIYPAVDPLDSTSTMLQPRIVGEEHYETAQRVKETLQRYKELQDIIAILGLDELSEEDRLIVARARKIERFLSQPFFVAEVFTGSPGKYVGLAETIRGFQLILSGELDGLPEQAFYLVGNIDEATAKAMNLEMESNLK

SEQ ID NO: 1552 - protein, 470 aa, Eremocitrus glauca
  unsure (1)..(470): unsure at all Xaa locations
NKNSXHIAQIIGPVLDVAFPPGKMPNIYNALVVKGRDTVDQPINVTCEVQQLLGNNRVRAVAMSATDGLTRGMEVIDTGAPLSVPVGGVTLGRIFNVLGEPVDNLGPVDTRTTSPIHKSAPAFIQLDTRLSIFETGIKVVDLLAPYRRGGKIGLFGGAGVGKTVLIMELINNIAKAHGGVSVFGGVGERTREGNDLYMEMKESGVINDQNLSESKVALVYGQMNEPPGARMRVGLTALTMAEYFRDVNEQDVLLFIDNIFRFVQAGSEVSALLGRMPSAVGYQPTLSTEMGSLQERITSTKEGSITSIQAVYVPADDLTDPAPATTFAHLDATTVLSRGLAAKGIYPAVDPLDSTSTMLQPRIVGEEHYETAQRVKQTLQRYKELQDIIAILGLDELSEEDRLTVARARKIERFLSQPFFVAEVFTGSPGKYVGLAETIRGFKLILSGELDGLPEQAFYLVGNIDEVTAK

SEQ ID NO: 1553 - protein, 489 aa, Nonea versicolor
  unsure (1)..(489): unsure at all Xaa locations
XSGVSTLEKKNLGRIVQIIGPVLDVAFSPGKMPNIYNALVVKGRDTGGQPINVTCEVQQLLGNNRVRAVAMSATDGLTRGMEVIDTGAPLSVPVGGATLGRIFNVLGEPVDNLGPVDTRTTSPIHRSAPAFIQLDTKLSIFETGIKVVDLLAPYRRGGKIGLFGGAGVGKTVLIMELINNIAKAHGGVSVFGGVGERTREGNDLYMEMKESGVINEENIAESKVALVYGQMNEPPGARMRVGLTALTMAEYFRDVNEQDVLLFIDNIFRFVQAGSEVSALLGRMPSAVGYQPTLSTEMGTLQERITSTKAGSITSIQAVYVPADDLTDPAPATTFAHLDATTVLSRGLAAKGIYPAVDPLDSTSTMLQPRIVGEEHYEIAQRVKQTLQRYKELQDIIAILGLDELSEEDRLTVARARKIERFLSQPFFVAEVFTGSPGKYVGLAETIRGFQLILSGELDGLPEQAFYLVGNIDEATAKAMNLEMESNLK

SEQ ID NO: 1554 - protein, 264 aa, Leptospira interrogans serovar lai str. 56601
MNSISSVFSSEQSVFIPYISLGDPDYDSCVIWADALIRGGAGILELGIPFTDPVADGPVIQKAFKRSLAHPFSMDKILEVTSEIHKLHPQIPLVYLTYFNPLFSMGLESFTERAKNSGIQGLIIPDLPFDTPEAEEFFSQLERKRIDFIHLVTPATTEDRIRSMKSLASGFIYYVTSYGVTGERGSIASGLEDRIRMVRKIVGLPVCAGFGISTSDQSKVISTYADGVIIGSAVQRIIEENGSDRNNCADKLLAYASEIRASMR

SEQ ID NO: 1555 - protein, 242 aa, Escherichia coli
LKERKEGAFVPFVTLGDPGIEQSLKIIDTLIEAGADALELGIPFSDPLADGPTIQNATLRAFAAGVTPAQCFEMLALIRQKHPTIPIGLLMYANLVFNKGIDEFYAQCEKVGVDSVLVADVPVEESAPFRQAALRHNVAPIFICPPNADDDLLRQIASYGRGYTYLLSRAGVTGAENRAALPLNHLVAKLKEYNAAPPLQGFGISAPDHVKAAIDAGAAGAISGSAIVKIIEQHINEPEKML

SEQ ID NO: 1556 - protein, 487 aa, Dombeya sp. Chase 273
  unsure (1)..(487): unsure at all Xaa locations
GVXTLEKEXLGRISQIIGPVLDVAFPPGKMPNIYNALVVKGRDTVGQQINVTCEVQQLLGNNRVRAVAMSATDGLTRGMEVIDTGAPLSVPVGGATLGRIFNVLGEPVDNLGPVDTRTTSPIHKPAPAFIQLDTKLSIFETGIKVVDLLAPYRRGGKIGLFGGAGVGKTVLIMELINNIAKAHGGVSVFGGVGERTREGNDLYMEMKESGVINEQNLAESKVALVYGQMNEPPGARMRVGLTALAMAEYFRDVNEQDVLLFIDNIFRFVQAGSEISALLGRMPSAVGYQPTLSTEMGTLQERITSTKEGSITSIQAVYVPADDLTDPAPATTFAHLDATTVLSRGLAAKGIYPAVDPLDSTSTMLQPRIVGEEHYETAQRVKQTLQRYKELQDIIAILGLDELSEEDRLTVARARKIERFLSQPFFVAEVFTGSPGKYVGLAETIRGFKLILSGELDGLPEQAFYLVGNIDEATAKATNLEMESNLK

SEQ ID NO: 1557 - protein, 202 aa, Streptococcus mutans
DPVADGPVIELAGQRSLVKGTSLASIIARLQEKKTQVPLVIMTYFNPVFQYGVETFVADLQNTSVKGLIIPDLPHEQESFIKPYLENLDLALVPLVSLTTGLERQKELIEDAQGFVYAVAINGVTGKTGNYRDDLDKHLKHLTEIAQIPVLTGFGVSTLADIKRFNQVSDGVIVGSKIVKGLHEGMQEEIKDFIYAGSHYQK

SEQ ID NO: 1558 - protein, 439 aa, Yersinia enterocolitica
MLSLDQIPHHIRHGIVGSRLIQIRGRVTQVTGTLLKAVVPGVRIGELCYLRNPDNSLSLQAEVIGFAQHQALLIPLGEMYGISSNTEVSPTGTMHQVGVGEHLLGQVLDGLGQPFDGGHLPEPAAWYPVYQDAPAPMSRKLITTPLSLGIRVIDGLLTCGEGQRMGIFAAAGGGKSTLLASLIRSAEVDVTVLALIGERGREVREFIESDLGEEGLRKAVLVVATSDRPSMERAKAGFVATSIAEYFRDQGKRVLLLMDSVTRFARAQREIGLAAGEPPTRRGYPPSVFAALPRLMERAGQSSKGSITALYTVLVEGDDMTEPVADETRSILDGHIILSRKLAAANHYPAIDVLRSASRVMNQIVSKEHKTWAGDLRRLLAKYEEVELLLQIGEYQKGQDKEADQAIERIGAIRGWLCQGTHELSHFNETLNLLETLTQ

SEQ ID NO: 1559 - protein, 423 aa, Salmonella enterica subsp. enterica serovar Typhi
MTDKRKDGSGKLLYCSFCGKSQHEVRKLIAGPSVYICDECVDLCNDIIREEIKEVAPHRERSALPTPHEIRTHLDDYVIGQEQAKKVLAVAVYNHYKRLRNGDTSNGVELGKSNILLTGPTGSGKTLLAETLARLLDVPFTMADATTLTEAGYVGEDVENIIQKLLQKCDYDVQKAQRGIVYIDEIDKISRKSDNPSITRDVSGEGVQQALLKLIEGTVAAVPPQGGRKHPQQEFLQVDTSKILFICGGAFAGLDKVIANRVETGSGIGFGATVKAKSDKASEGELLSQVEPEDLIKFGLIPEFIGRLPVVATLNELSEEALVQILKEPKNALTKQYQALFNLEGVDLEFRDEALNAIARKAMARKTGARGLRSIVEAALLDTMYDLPSMEDVEKVVIDESVIAGQSKPLLIYGKPEAQASGE

SEQ ID NO: 1560 - protein, 623 aa, Gossypium hirsutum
MPAVYGSRLTTFEDSEKESEYGYVRKVSGPVVVADGMAGAAMYELVRVGHDNLIGEIIRLEGDSATIQVYEETAGLMVNDPVLRTHKPLSVELGPGILGNIFDGIQRPLKTIAKRSGDVYIPRGVSVPALDKDALWDFQPKKIGEGDLLTGGDLYATVFENSLMQHHVALPPDAMGKITYIAPPGQYSLKDTVLELEFQGVKKQFTMLQTWPVRTPRPVATKLAADTPLLTGQRVLDALFPSVLGGTCAIPGAFGCGKTVISQALSKYSNSDAVVYVGCGERGNEMAEVLMDFPQLTMTLPDGREESVMKRTTLVANTSNMPVAAREASIYTGITIAEYFRDMGYNVSMMADSTSRWAEALREISGRLAEMPADSGYPAYLAARLASFYERAGKVKCLGGPERTGSVTIVGAVSPPGGDFSDPVTSATLSIVQVFWGLDKKLAQRKHFPSVNWLISYSKYSGALESFYEKFDPDFISIRTKAREVLQREDDLNEIVQLVGKDALAETDKITLETAKLLREDYLAQNAFTPYDKFCPFYKSVWMMRNIVHFNALANQAVEKAAGMDGQKITYSLIKHRLGDLFYRLVSQKFEDPAEGEEALVAKFKKLNEDLTAGFRALEDETR

SEQ ID NO: 1561 - protein, 505 aa, Hordeum vulgare subsp. vulgare
MAGNMLANYVQVYVMLPLDVVSVDNKFEKGDEIRAHVKKLTEAGVDGVMIYFWWGLVEGIGPKAYHWTPYNHVFYLVHDARLQLQAIMSFHQCGGNVGDLFNIPIPQWVRDVGATDPDIFYTNRRGTRNIDYLTLGVDDQPLFHGRTAVQMYHDYMASFRENMKKFLDAGTIVDIEVGLGPAGEMRYPSYPQSQGWVFPGIGEFICYDKYLEADFKAAAAKAGHPEWELPDDAGEYNDTPEKTQFFKENGTYLTEKGKFFLSWYSNKLIKHGDKILDEANKVFLGCRVHLAIKISGIHWWYRVPNHAAELTAGYYNLDDRDGYRTIARMLTRHHASMNFTCAEMRDSEQSEEAKSAPEELVQQVLSAGWREGLHVACENALSRYDATAYNTILRNARPKGINENGPPEHKLFGFTYLRLSNELLKGQNYATFQTFVEKMHANLAHNPSVDPVAPLEKSKPEMPIELILKAAQPKLEPFPFDKNTDLPVKNHTDVVDEALLAPVAV

SEQ ID NO: 1562 - protein, 305 aa, Cyanidium caldarium
MNVITETEYKEENINENTLVNIQEEYKKTKIQEVLNQLDKELIGLTPVKNRIKEIAALLLIDKLRIKLNLPQANPGLHMSFTGSPGTGKTTVATKMADILYLLGYIRKGHLLTVTRDDLVGQYIGHTAPKTKEVLKRAMGGVLFIDEAYYLYKPDNERDYGSEAIEILLQVMENQRNDLVVILAGYKDKMERFYQSNPGLSSRITNHVDFPDYTAEELLEIGIMMLEEQQYQLTEEGKKVLLEYIKRRMTQPHFANARSIRNAIDRARMRQANRIFNSSNRVLTKKDLVTIEAEDILKSSLFMDK

SEQ ID NO: 1563 - protein, 113 aa, Triticum aestivum
PRVRITIASEGFVYLVSINGVTGARPDVNPRVKDLLKEIKQVTNKAVAVGFGISTPDHIRQVAQWGADGVIIGSAMVKHLGEADSPREGLKRLEVYARSLKDALSGGSIIGAS

SEQ ID NO: 1564 - protein, 317 aa, Ralstonia eutropha
MSAPETTAPLQPPAAQAASLPGSLAESLASSGITELLAQLDRELIGLKPVKARIRDIAALLLVDKLRAARGFSAGAPSLHMCFTGNPGTGKTTVAMRMAQILHQLGYVRRGHLVAVTRDDLVGQYIGHTAPKTKEILKKALGGVLFIDEAYYLYRPENERDYGQEAIEILLQVMENNRDDLVVILAGYKDRMDRFFESNPGMSSRVAHHVDFPDYQLDELRQIADLMLAEMQYRFDDESRAVFADYLARRMAQPHFANARSVRNALDRARLRHASRLLDDAGTVADDRTLTTITASDLLASRVFSKAAPAAQTPAKE

SEQ ID NO: 1565 - protein, 489 aa, Sagittaria latifolia
GPAVSTREEKKVGRIDQIIGPVLDVAFSPGKMPYIYNALIVKGRDTAGQQINVTCEVQQLLGNNRVRAVAMSATDGLTRGMEVMDTGAPLSVPVGGATLGRIFNVLGEPVDNLGPVDTSTTSPIHRSAPAFIQLDTKLAIFETGIKVVDLLAPYRRGGKIGLFGGAGVGKTVLIMELINNIAKAHGGVSVFGGVGERTREGNDLYMEMKESGVINEENITKSKVALVYGQMNEPPGARMRVGLTALTMAEYFRDVNEQDVLLFIDNIFRFVQAGSEVSALLGRMPSAVGYQPTLSTEMGSLQERITSTKEGSITSIQAVYVPADDLTDPAPATTFAHLDATTVLSRGLAAKGIYPAVDPLDSTSTMLQPRIVGEEHYEIAQRVKQTSQRYKELQDIIAILGLDELSEEDRLTVARARKMERFLSQPFFVAEVFTGSPGKYVGLAETIRGFQLILSGELDGLPEQAFYLVGTIDEATAKAINLEVESKLT

SEQ ID NO: 1566 - protein, 159 aa, Agrocybe aegerita
RTCLKIRNVLAEFEEYTVSNQSPYAQWTQQDVKRPPVAIVGAREYIFSENIGILGDLAAGKEQTFGTLSARSMAWIGGKLHYGHPDFLNALYMTTRGGVSKAQKGLHLNEDIYAGMNAFGRGSRIKHTEYYQCGKGRDLGFGTILNFQTKIGTGMGEHM

SEQ ID NO: 1567 - protein, 473 aa, Oryza sativa
  unsure (1)..(473): unsure at all Xaa locations
MEASKLYYRVLEAICRAESQNNNVNNLTPLLSNERFHRCLIACSAELVLATHKTVIMMFPAVLESTGLTAFDLSKIIENFVRHEETLPRELKRHLNSLEEQLLESMSWEKGSSLYNSLVVARPSLSTEINSLGLLAEPMPSLDGIVARQSIHPDGLPPTPSKRSSAGPDGNCYPQSPKRLCTESRNSLVERNSQTPPPKQSQTGLSILKAKYHPLQATFASPTVSNPVSGNEKCAVVGVQIFFSKILKLAAIRIRNLCERLRHEELTVSVYNIFKQILDQQTALFFNRHVDQIILCCLYGVAKGXXGSRHVDIIVFYNQVFVPTVKPLLVALMPSSTRPEDKRNTNSQIPGSPKSSPFSNLPDMSPKKVSSSHNVYVSPLRQTKMDALLSPSSRSFYACIGESTQAFQSPSKDLAAINSRLNYPTRRINTRINFDMVSDSVVAGSLGQPNGGSASSDPAAAFSPLSKKSKTDS

SEQ ID NO: 1568 - protein, 258 aa, Streptococcus pneumoniae TIGR4
MPKTLTEKLNAIKAAGKGIFVPYIMAGDHEKGLDGLAETIHFLEDLGVSAIEVGIPFSDPVADGPVIEEAGLRSLAHGTSTQALVETLKTIETEIPLVIMTYFNPLFQYGVENFVKDLADTAVKGLIIPDLPHEHANFVEPFLANTDIALIPLVSLTTGIERQKELIEGAEGFIYAVAINGVTGKSGNYRADLDKHLAQLHQVADIPVLTGFGVSSQADLERFNAVSDGVIVGSKIVKALHQGEPIQDFIRQAVAYQK

SEQ ID NO: 1569 - protein, 319 aa, Glycine max
MSIGCEKTTEGDRGCMQDTNQESGATLPGYGGCSSLAEKHGEKRVAENDDDVREDNKKLREWVPSLVPKTGGGGYFLHSNPIEVKESSGEDEISHIDKVTIASDQGRLMSSGSQFTEGDRPFLQCSEEKPSLPSSFRTCDLNLIEASEVHENHVDHPVLLYPPAVSETKKAVPIDIDLTMSHASVSGKFNTHATNGKEIEVIDLENDDSIQEEKSIDSMDRKTETMFPGLEGFSSHAQNAADMHDVQDGYGLMISELLGPDFPNCSSVPGDINSVHNEMGLHGGTGTLAEDDSIYMSLGELSFLRPWEQPPSQDYQKPF

SEQ ID NO: 1570 - protein, 281 aa, Glycine max
MSESKDENPDLPPKSKPQEEHGFAMDFDISLESLWPSDHISLVSNPMSPFLFSTSSEQPFSPVWAFSDAEDERQIRIAASEVIQIQQLKIQLKMMTTKKTVPPLVAMTASENPDGYCLIKERMTQALRHFKELTEQNVLAQVWAPVRNGNRYALTTSGQPFVLDPHSNGLHQYRTASLMYMFSVDGENDEILGLPGRVFQHKIPEWTPNVQFYSSKEYQRLNHAQHYNVRGTLALPVFELARQSCVAVVELIMTSQKINYASEVDKICKAFEAVKLRSSEI

SEQ ID NO: 1571 - protein, 623 aa, Gossypium hirsutum
MPAVYGARLTTFEDSEKESEFGYVRKVSGPVVVADGMAGAAMYELVRVGHDNLIGEIIRLEGDSATIQVYEETAGLMVNDPVLRTHKPLSVELGPGILGNIFDGIQRPLKTIAKRSGDVYIPRGVSVPALDKDTLWEFQPKKIGEGDLLTGGDLYATVFENSLMQHHVALPPDAMGKITYIAPPGQYSLKDTVLELEFQGVKKQFTMLQTWPVRTPRPVATKLAADTPLLTGQRVLDALFPSVLGGTCAIPGAFGCGKTVISQALSKYSNSDAVVYVGCGERGNEMAEVLMDFPQLTMTLPDGREESVMKRTTLVANTSNMPVAAREASIYTGITIAEYFRDMGYNVSMMADSTSRWAEALREISGRLAEMPADSGYPAYLAARLASFYERAGKVKCLGGPERTGSVTIVGAVSPPGGDFSDPVTSATLSIVQVFWGLDKKLAQRKHFPSVNWLISYSKYSGALESFYEKFDPDFISIRTKAREVLQREDDLNEIVQLVGKDALAETDKITLETAKLLREDYLAQNAFTPYDKFCPFYKSVWMMRNIVHFNALANQAVEKAAGMDGQKITYSLIKHRLGDLFYRLVSQKFEDPAEGEEALVAKFKKLNEDLTAGFRALEDETR

SEQ ID NO: 1572 - protein, 506 aa, Saccharomyces cerevisiae
MPESRLQRLANLKIGTPQQLRRTSIIGTIGPKTNSCEAITALRKAGLNIIRLNFSHGSYEFHQSVIENAVKSEQQFPGRPLAIALDTKGPEIRTGRTLNDQDLYIPVDHQMIFTTDASFANTSNDKIMYIDYANLTKVIVPGRFIYVDDGILSFKVLQIIDESNLRVQAVNSGYIASHKGVNLPNTDVDLPPLSAKDMKDLQFGVRNGIHIVFASFIRTSEDVLSIRKALGSEGQDIKIISKIENQQGLDNFDEILEVTDGVMIARGDLGIEILAPEVLAIQKKLIAKCNLAGKPVICATQMLDSMTHNPRPTRAEVSDVGNAVLDGADCVMLSGETAKGDYPVNAVNIMAATALIAESTIAHLALYDDLRDATPKPTSTTETVAAAATAAILEQDGKAIVVLSTTGNTARLLSKYRPSCPIILVTRHARTARIAHLYRGVFPFLYEPKRLDDWGEDVHRRLKFGVEMARSFGMVDNGDTVVSIQGFKGGVGHSNTLRISTVGQEF

SEQ ID NO: 1573 - protein, 586 aa, Haloferax volcanii
MSQATQDSVREDGVIASVSGPVVTARGLDARMNDVVYVGDEGLMGEVIEIEGDLTTIQVYEETSGVGPGEPVESTGEPLTVDLGPGMMDAIYDGVQRPLDVLESKMDSAFLDRGVDAPGIDLDEKWEFEPTVSEGDEVAPGDVVGTVPETVTIEHKVMVPPDFGGGEVVAVEEGEFSVTEAVVELDSGEEITMHQEWPVRQARPAAEKKTPREPLVSGQRILDGLFPIAKGGTAAIPGPFGSGKTVTQHQLAKWADADIVVYVGCGERGNEMTEVIEDFPELDDPKTGNPLMARTCLIANTSNMPVAARESCIYTGITIAEYYRDMGYDVALMADSTSRWAEAMREISSRLEEMPGEEGYPAYLAARLSEFYERAGYFTTVNGEEGSVSVIGAVSPPGGDFSEPVTQNTLRIVKTFWALDADLAERRHFPAINWNESYSLYQEQLDPWFVENVEDDWAEERQWAVDVLDEENELQEIVQLVGKDALPEDQQLTLEIARYLREAYLQQNAFHPTDTYCSPEKTYGILTAIHAFNDEAFKALEAGVPVEEIQAIEAAPRLNRIGVQEDWEAYIEDLKAEITEQLRELY

SEQ ID NO: 1574 - protein, 423 aa, Burkholderia fungorum
MADKKGSNSEKLLYCSFCGKSQHEVKKLIAGPSVFICDECIDLCNEIIRDEAAGAGIEAGLSKSDLPSPQEIREILDQYVIGQERAKKILAVAVYNHYKRLKHLDKKDEIELSKSNILLIGPTGSGKTLLAQTLARLLNVPFVIADATTLTEAGYVGEDVENIIQKLLQNCNYEVDKAQRGIVYIDEIDKISRKSDNPSITRDVSGEGVQQALLKLVEGTMASVPPQGGRKHPNQDFIQVDTTNILFICGGAFDGLEKVIVDRTEKTGIGFGASVKSKQDRDAGEVLREVEPEDLIKFGLIPELIGRLPVVATLGKLDEVALMKILVEPKNALVKQYHKLFNMERVELEIRPAALQAVARKAIRRKTGARGLRSILEQALLDVMYDLPQMKGISKVIIDDNVIDGDGKPLLIYEDAPKVAGSN

SEQ ID NO: 1575 - protein, 462 aa, Escherichia coli
MKKTKIVCTIGPKTESEEMLAKMLDAGMNVMRLNFSHGDYAEHGQRIQNLRNVMSKTGKTAAILLDTKGPEIRTMKLEGGNDVSLKAGQTFTFTTDKSVIGNSEMVAVTYEGFTTDLSVGNTVLVDDGLIGMEVTAIEGNKVICKVLNNGDLGENKGVNLPGVSIALPALAEKDKQDLIFGCEQGVDFVAASFIRKRSDVIEIREHLKAHGGENIHIISKIENQEGLNNFDEILEASDGIMVARGDLGVEIPVEEVIFAQKMMIEKCIRARKVVITATQMLDSMIKNPRPTRAEAGDVANAILDGTDAVMLSGESAKGKYPLEAVSIMATICERTDRVMNSRLEFNNDNRKLRITEAVCRGAVETAEKLDAPLIVVATQGGKSARAVRKYFPDATILALTTNEKTAHQLVLSKGVVPQLVKEITSTDDFYRLGKELALQSGLAHKGDVVVYGFWCTGTERHY

SEQ ID NO: 1576 - protein, 507 aa, Oryza sativa
MEEQQEGAAGVMRRRPKTKIVCTLGPASRSVEMIGRLLRAGMCVARFNFSHGSHEYHQETLDNLRAAMESTGILCAVMLDTKGPEIRTGFLKDGKPVQLKKGQEITVSTDYSIKGDDNMISMSYKKLAVDLKPGSVILCADGTITLTVLHCDKEQGLVRCRCENTAMLGERKNVNLPGVIVDLPTLTEKDKEDILKWGVPNKIDMIALSFVRKGSDLVEVRKVLGKHAKSIMLMSKVENQEGVANFDDILAQSDAFMVARGDLGMEIPIEKIFYAQKVMIFKCNIQGKPVVTATQMLESMIKSPRPTRAEATDVANAVLDGTDCVMLSGETAAGAYPELAVRTMAKICLQAESCVDHAAVFKSITASAPIPMSPLESLASSAVRTANSAKAALILVLTRGGTTARLVAKYRPSMPILSVVVPELKQTDSFDWTCSDEAPARHSLIVRGVIPMLSAATAKAFDNEATEEALGFAISNAKAMGLCNSGESVVALHRIGTASVIKLLTAN

SEQ ID NO: 1577 - protein, 265 aa, Chrysanthemum x morifolium
MANSDAFELDFSCIDRSMSFPDESADMSPQRKLGKGKIEIKRIENTTNRQVTFCKRRNGLLKKAYELSVLCDAEVALIVFSSRGRLYEYANNSVRGTIDRYKKACLDPPSSGSVSEANAQYYQEESGKLRSQIANLQNQNRQFYRNIMGESLTDMPMKDLKNLETKLEKAITRIRSKKNELLFAEIEYMQKRELELHNNNQFLRAKIAENERSAQQQHMSLMPGSSDYELVTPHQPFDGRNYLQSNEMQPSNDYSCQDQTPLQLV

SEQ ID NO: 1578 - protein, 539 aa, Caulobacter crescentus CB15
MAKTPAEKPATAAKKPAAPKAAAAPKAAAAKAPAAAKAPAAKKPAAPKAAAAPKAPAAGLEGATGRLVQIIGAVVDIEFDGALPAILNAVETVNTATGQRLVFEVAQHLGQSTVRAIAMDATEGLVRGQPVRDTGEPIRVPVGPGTLGRIMNVIGEPIDEQGPIRSDISRTIHRDAPSFAEQTNTAEVLVTGIKVIDLMCPYTKGGKIGLFGGAGVGKTVTMQELINNIAKAYGGYSVLAGVGERTREGNDLYHEMIESNVNVDPKANNGSTEGSRCALVYGQMNEPPGARARVALTGLSIAEYFRDEEGKDVLLFVDNIFRFTQAGAEVSALLGRIPSAVGYQPTLATEMGNLQERITSTNKGSITSVQAIYVPADDLTDPAPATSFAHLDATTVLSRDIAAQAIFPAVDPLDSTSRIMDPLVIGEEHYTVARRVQEVLQQYKALKDIIAILGMDELSEEDKLVVARARKIQRFLSQPFHVAEQFTNTPGAFVQLKDTIRSFKGIVDGEYDHLPEGAFYMVGPIEEAVAKAEKMAAEA

SEQ ID NO: 1579 - protein, 285 aa, Glycine max
  unsure (1)..(285): unsure at all Xaa locations
MEEQECQVVENKETPTPPVRVYADGIYDLFHFGHARSLEQAKKXFPNTYLLVGCCNDEITHKYKGKTVMTEKERYESLRHCRWVDEVIPDAPWVITREFLDKHQIDYVAHDSLPYADASGAGKDVYEYVKSVGKFKETKRTDGISTSDIIMRIIKDYNQYVMRNLDRGYTRKELGVSYVKEKRLRMNMGLKKLQERVKNHQEKVGKKIQTVGKIAGMHPNEWVENADRLVAGFLEMFEEGCHKMGTAIRDRIQEQLKAQQLKSLLYDEWDDDEFYVDDDDEYYTD

SEQ ID NO: 1580 - protein, 268 aa, Salmonella typhimurium
MERYENLFAQLNDRREGAFVPFVTLGDPGIEQSLKIIDTLIDAGADALELGVPFSDPLANGPTIQNANLRAFAAGVTPAQCFEMLALIREKHPTIPIGLLMYANLVFNNGIDAFYARCEQVGVDSVLVADVPVEESAPFRQAALRHNIAPIFICPPNADDDLLRQVASYGRGYTYLLSRSGVTGAENRGALPLHHLIEKLKEYHAAPALQGFGISSPEQVSAAVRAGAAGAISGSAIVKIIEKNLASPKQMLAELRSFVSAMKAASRA

SEQ ID NO: 1581 - protein, 120 aa, Triticum aestivum
LTTPTTKAERMNEITSASEGFVYLVSIPRLTGARPSVRPHVKSWCREIKQVTDKAVAVGFGISTPDHVRQVAQWGADGVIIGSAMVKQLGEANSPREGLKRLEVYARSLKDALHAVICTI

SEQ ID NO: 1582 - protein, 563 aa, Neurospora crassa
MFAARTPASQHLARLRYISYSSRLALSPRRSQSYNNQGFSSSYDPNQENGRGPIFSNKASFGVPQFYPRDLKRRVDDYVVGQDRAKKTICSVIFNHYQNIRRRQHHEIQDQRQREKLQRQRYARDHRDLQDREGYSGSSRDIHPTPSVDDFYIPEDTNAPQRVKIDKSNLLLIGPTGVGKTYILETLSKKLNVPFTISDCNSFTQAGYIGQDVEACIERLLIEANYDVKAAEHGIVVLDEFDKIARRETVNGRDVGGEGVQQALLKLVEGTKVTVSVKDHRSSRPPPPPNLNISTPGYGPTSTTPSATPGKVEQYIVDTSNILFVFCGAFVGLDKTVLRRVAKPSIGFGAEVRNHRGSSMSSSQDILPPELYSHLPHQPPTMPVDLSGGSLASHGAGGFTPLDLASPADLQAFGFIPELIGRLHNICALSPLSLDELYRILTEPRNSLVAQYTALFETYPSKLYFTRKALYAIAERAAKNETGARGLKMEMERVLAEPMYDAPMPYVLITEGCVKGTEKAGYWGKDGRLELERMMAEEDQKGLGQGPVEGGFERMREAGQSGA

SEQ ID NO: 1583 - protein, 420 aa, Staphylococcus aureus subsp. aureus Mu50
MFKFNEDEENLKCSFCGKDQDQVKKLVAGSGVYICNECIELCSEIVEEELAQNTSEAMTELPTPKEIMDHLNEYVIGQEKAKKSLAVAVYNHYKRIQQLGPKEDDVELQKSNIALIGPTGSGKTLLAQTLAKTLNVPFAIADATSLTEAGYVGDDVENILLRLIQAADFDIDKAEKGIIYVDEIDKIARKSENTSITRDVSGEGVQQALLKILEGTTASVPPQGGRKHPNQEMIQIDTTNILFILGGAFDGIEEVIKRRLGEKVIGFSSNEADKYDEQALLAQIRPEDLQAYGLIPEFIGRVPIVANLETLDVTALKNILTQPKNALVKQYTKMLELDDVDLEFTEEALSAISEKAIERKTGARGLRSIIEESLIDIMFDVPSNENVTKVVITAQTINEETEPELYDAEGNLINNSKTSA

SEQ ID NO: 1584 - protein, 481 aa, Pharus parvifolius
TSRPGVSTIEEKSTGRIDQIIGPVLDVTFPPGKLPYIYNALVVKSRDTAGKQINVTCEVQQLLGNNRVRAVAMSATEGLMRGMEVIDTGASLSVPVGGATLGRIFNVLGEPVDNLGPVDTSTTFPIHRSAPAFIELDTKLSIFETGIKVVDLLAPYRRGGKIGLFGGAGVGKTVLIMELINNIAKAHGGVSVFGGVGERTREGNDLYMEMKESGVINEKNIAESKVALVYGQMNEPPGARMRVGLTALTMAEYFRDVNKQDVLLFIDNIFRFVQAGSEVSALLGRMPSAVGYQPTLSTEMGSLQERITSTKKGSITSIQAVYVPADDLTDPAPATTFAHLDATTVLSRGLASKGIYPAVDPLDSTSTMLQPRVVGNEHYETAQRVKQTLQRYKELQDIIAILGLDELSEEDRLTVARARKIERFLSQPFFVAEVFTGSEGKYVGLAETIRGFQLILSGELDGLPEQPFYLVGNIDEASTKA

SEQ ID NO: 1585 - protein, 424 aa, Brucella suis 1330
MSKVSNGGGDSKNTLYCSFCGKSQHEVRKLIAGPTVFICDECVELCMDIIREENKSSMVKSREGVPTPQEIMAVLDDYVIGQKDAKRVLSVAVHNHYKRLAHQSKNSDIELAKSNILLVGPTGCGKTYLAQTLARIIDVPFIMADATTLTEAGYVGEDVENIILKLLQAADYNVERAQRGIVYIDEVDKISRKSDNPSITRDVSGEGVQQALLKIMEGTVASVPPQGGRKHPQQEFLQVDTTNILFICGGAFAGLDRIISARGEKTSIGFGATVKSVDERRIGEVFKELEPEDLLKFGLIPEFVGRLPVIATLEDLDVDALVQILTEPKNALVKQYQRLFDMENVELVFHDDALRAIANKAVEHKTGARGLRSIMEKILLDTMFELPTLEGVREVVISGDVVDGSARPLYIYAERQDEKGNVSA

SEQ ID NO: 1586 - protein, 402 aa, Chara rusbyana
LLGDNKVRAVAMSATDGLMRGMEVIDTGAPLSVPVGETTLGRIFNVLGEPVDNLGPVDTSITFPIHRAAPAFTQLDTKLSIFETGIKVVDLLAPYRRGGKIGLFGGAGVGKTVLIMELINNIAKAHGGVSVFGGVGERTREGNDLYMEMKESKVINEENISESKVALVYGQMNEPPGARMRVGLTALTMAEYFRDVNKQDVLLFIDNIFRFVQAGSEVSALLGRMPSAVGYQRTLSTEMGSLQERITSTKEGSITSIQAVYVPADDLTDPAPATTFAHLDATTVLSRNLAAKGIYPAVDPLDSTSTMLQPWIVGEEHYETAQGVKETLQRYKELQDIIAILGLDELSEEDRLIVARARKIERFLSQPFFVAEVFTGSPGKYVSLIDTIKGFQMILSGELDAL

SEQ ID NO: 1587 - protein, 591 aa, Chlamydia muridarum
MVATSKQTTQGYVVEAYGNLLRVHFDGHVRQGEVAYVSVDDTWLKAEIIEVVGDEVKVQVFEETQGISRGALVTFSGHLLEAELGPGLLQGIFDGLQNRLEVLADTSLFLKRGEYVNAICRETVWAYTQKASVGDVLSRGDVLGTVKEGRFDHKIMVPFSCFEEVTITWVISSGDYTVDTVIAKGRTASGAELEFTMVQKWPIKQAFLEGEKVPSHEIMDVGLRVLDTQIPVLKGGTFCTPGPFGAGKTVLQHHLSKYAAVDIVVLCACGERAGEVVEILQEFPHLTDPHTGQSLMHRTCIICNTSSMPVAARESSIYLGITIAEYYRQMGLHVLLLADSTSRWAQALREISGRLEEIPGEEAFPAYLASRIAAFYERGGAVKMKDGSEGSLTICGAVSPAGGNFEEPVTQATLSVVGAFCGLSKARADARRYPSIDPMISWSKYLDSVAEILEKKVPGWGDSVKKASRFLEEGAEIGKRIEVVGEEGISMEDIEIFLKSELYDFCYLQQNAFDAEDCYCPFDRQIELFSLMSHIFSSRFCFDCPDNARSFFLELQSKIKTLNGQKFLSEDYQKGLEVIYKLLESKMVQTA

SEQ ID NO: 1588 - protein, 490 aa, Isopogon buxifolius
  unsure (1)..(490): unsure at all Xaa locations
GPGVSALEEKNLGRIAQIIGPVLDVAFPPGKMPNIYNALVVKGRDTVGQQINVTCEVQQLLGNNRVRAVAMSATEGLMRGMEVIDTGAPLSVPVGGATLGRIFNVLGEPVDNLGPVDTRTTSPIHRSAPAFIQLDTKLSIFETGIKVVDLLAPYRRGGKIGLFGGAGVGKTVLIMELINNIAKAHGGVSVFGGVGERTREGNDLYMEMKESGVINEQNIAESKVALVYGQMNEPPGARMRVGLTALTMAEYFRDVNEQDVLLFIDNIFRFVQAGSEVSALLGRMPSAVGYQPTLSTEMGSLQERITSTKEGSITSIQAVYVPADDLTDPAPATTFAHLDATTVLSRGLAAKGIYPAVDPLDSTSTMLQPRIVGEEHYETAXRVKQTLQRYKELQDIIAILGLDELSEEDRLTVARARKIERFLSQPFFVAEVFTGSPGKYVGLAETIRGFQLILSGELDGLPEQAFYLVGNIDEATAKAMNLXVESNLKK

SEQ ID NO: 1589 - protein, 482 aa, Lysimachia maxima
MRINPTTSGPGTSVLEKKNLGRIIQIIGPVLDVSFPPGKMPNIYNALVVKGRDMAGQPINVTCEVQQLLGNNRVRAVAMSATDGLTRGMEVIDTGAALSVPVGGATLGRIFNVLGEPVDNLGPVDTRTTSPIHRSAPAFIQLDTKLSIFETGIKVVDLLAPYRRGGKIGLFGGAGVGKTVLIMELINNIAKAHGGVSVFGGVGERTREGNDLHMEMKESGVINEENIAESKVALVYGQMNEPPGARMRVGLTALTMAEYFRDVNEQDVLLFIDNIFRFVQAGSEVSALLGRMPSAVGYQPTLSTEMGSLQERITSTKEGSITSIQAVYVPADDLTDPAPATTFAHLDATTVLSRGLAAKGIYPAVDPLDSTSTMLQPRIVGEEHYEIAQRVKETLQRYKELQDIIAILGLDELSEDDRLTVARARKIERFLSQPFFVAEVFTGSPGKYVGLAKTIRGFQLILSGKLDGLPEQAFYLVGNIDE

SEQ ID NO: 1590 - protein, 375 aa, Oryza sativa
  unsure (1)..(375): unsure at all Xaa locations
SLPGAGEGGGGGIGGGGGDLWPFDSLTTSLLFSSVSASPQPLPASSSSWLTPPSPLFHLSIDDNTDSSCLFKERLTQALRYFKESTDQHLLVQVWAPVKSGDRYVLTTSGQPFVLDQQSIGLLQYRAVSMMYMFSVDGENAGELGLPGRVYKQKVPEWTPNVQYYSSTEYPRLNHAISYNVHGTVALPVFDPSVQNCIAVVELIMTSKKINYAGEVDKVCKALEAVNLKSTEILDHPNVQICNEGRQSALVEILEILTVVCEEHKLPLAQTWVPCKYRSVLAHGGGVKKSCLSFDGSCMGEVCMSTSDVAFHVIDAHMWGFRDACVEHHLQKGQGVSGKAXIYRRPCFSKDISQFCKLEYPLVHYARMFXGLAGC

SEQ ID NO: 1591 - protein, 465 aa, Myxococcus xanthus
MAESRKLSAFTPREVVSELDRYIVGQNAAKRAVAIALRNRWRRQQVDDDLRDEIHPKNIIMIGPTGVGKTEIARRLAKLAQAPFVKVEASKFTEVGYVGRDVESMIRDLVEAAIALVREEETEKVGPRAEELAEDRLIELMQGGGVKSSSATPPFGFAPPPPPPVQRVSDSAREKFRAQLRAGTLDDVEVEVETAESSPTFMRGFSGQGMEEIGVNLQDLFKNVPGMNKTRRRRVRVPEALQLLRKEKAAKLVDPDRVQREAVARAEMNGIIFIDEIDKIASREGGKGGGGPDVSREGVQRDILPIVEGSTINTKYGVVKTDHMLFIAAGAFHVSKPSDLIPELQGRFPIRVELEPLTGEDLVRILREPKNSLLRQYTALLSTEGVRLSFTDDAVTELARIAQQANESTANIGARRLHTILERLLDEVSFSASEMGPRDFQVDAAYVRERLAAIVQDEDLSRYIL

SEQ ID NO: 1592 - protein, 776 aa, Thermoplasma volcanium
MGKIVRISGPVVVAEDIENAKMYDVVKVGEMGLIGEIIRIEGNRSTIQVYEDTAGIRPDEKVENTMRPLSVELGPGLLKSIYDGIQRPLDVIKETSGDFIARGLNPPPLDRKKEWDFVPAVKKNDIVYPGQVIGTVQETSLITHRIIVPDGVSGKIKSIYEGKRTVEDVVCTISTEHGDVDVNLMTTWPVRKARRVVRKLPPEIPLVTGQRVIDALFPVAKGGTAAVPGPFGSGKCVSGETPVYLADGKTIKIKDLYSSERKKEDNIVEAGSGEEIIHLKDPIQIYSYVDGTIVRSRSRLLYKGKSSYLVRIETIGGRSVSVTPVHKLFVLTEKGIEEVMASNLKVGDMIAAVAESESEARDCGMSEECVMEAEVYTSLEATFDRVKSIAYEKGDFDVYDLSVPEYGRNFIGGEGLLVLHNTVIQHQLAKWSDANIVVYIGCGERGNEMTEILTTFPELKDPVSGQPLMDRTVLIANTSNMPVAAREASIYTGITIAEYYRDMGYDVALMADSTSRWAEALREISGRLEEMPGEEGYPAYLGRRISEFYERSGRARLVSPEDRFGSITVIGAVSPPGGDISEPVSQNTLRVTRVFWALDASLANRRHFPSINWLNSYSLYTEDLRHWYDENVAKDWGSLRSQAMDILQRESELQEVAQLVGYDAMPEKEKSILDVARIIREDFLQQSAFDEIDSYCSLRKQYLMLKAIMELNSYQSMAIDHGVTMDNLSSLPVREKLSRMKIVPEDQVESYYSSIIKEIHKEYTSFIGEKNAEANI

SEQ ID NO: 1593 - protein, 491 aa, Lactoris fernandeziana
  unsure (1)..(491): unsure at all Xaa locations
PGXXVSTLEGKNLGHIAQIIGPVLDVAFPPGKMPNIYNALVVKGRENIGQQINVTCEVQQLLGNNRVRAVAMSATDGLTRGMEVIDTGAPLSVPVGGATLGRIFNVLGEPVDNLGPVDTRTTSPIHRSAPAFIQLDTKLSIFETGIKVVDLLAPYRRGGKIGLFGGAGVGKTVLIMELINNIAKAHGGVSVFGGVGERTREGNDLYMEMKESGVINEQNLTESKVALVYGQMNEPPGARMRVGLTALTMAEYFRDVNEQDVLLFIDNIFRFVQAGSEVSALLGRMPSAVGYQPTLSTEMGSLQERITSTKEGSITSIQAVYVPADDLTDPAPATTFAHLDATTVLSRGLAAKGIYPAVDPLDSTSTMLQPRIVGEEHYETAQRVKQTLQRYKELQDIIAILGLDELSEEDRLTVARARKIERFLSQPFFVAEVFTGSPGKYVGLAETIRGFQLILSGELDGLPEQAFYLVGNIDEATAKAMNLDVESNSKK

SEQ ID NO: 1594 - protein, 446 aa, Helicobacter pylori 26695
MNETLYCSFCKKPESRDPKKRRIIFASNLNKDVCVCEYCIDVMHGELHKYDNSLLALKRDRLRRMESSAYEEEFLLSYIPAPKELKAVLDNYVIGQEQAKKVFSVAVYNHYKRLSFKEKLKKQDNQDSNVELEHLEEVELSKSNILLIGPTGSGKTLMAQTLAKHLDIPIAISDATSLTEAGYVGEDVENILTRLLQASDWNVQKAQKGIVFIDEIDKISRLSENRSITRDVSGEGVQQALLKIVEGSLVNIPPKGGRKHPEGNFIQIDTSDILFICAGAFDGLAEIIKKRTTQNVLGFTQEKMSKKEQEAILHLVQTHDLVTYGLIPELIGRLPVLSTLDSISLEAMVDILQKPKNALIKQYQQLFKMDEVDLIFEEEAIKEIAQLALERKTGARGLRAIIEDFCLDIMFDLPKLKGSEVRITKDCVLKQAEPLIIAKTHSKILP

SEQ ID NO: 1595 - protein, 484 aa, Chlamydophila pneumoniae CWL029
MITRTKIICTIGPATNSPEMLAKLLDAGMNVARLNFSHGSHETHGQAIGFLKELREQKRVPLAIMLDTKGPEIRLGNIPQPISVSQGQKLRLVSSDIDGSAEGGVSLYPKGIFPFVPEGADVLIDDGYIHAVVVSSEADSLELEFMNSGLLKSHKSLSIRGVDVALPFMTEKDIADLKFGVEQNMDVVAASFVRYGEDIETMRKCLADLGNPKMPIIAKIENRLGVENFSKIAKLADGIMIARGDLGIELSVVEVPNLQKMMAKVSRETGHFCVTATQMLESMIRNVLPTRAEVSDIANAIYDGSSAVMLSGETASGAHPVAAVKIMRSVILETEKNLSHDSFLKLDDSNSALQVSPYLSAIGLAGIQIAERADAKALIVYTESGSSPMFLSKYRPKFPIIAVTPSTSVYYRLALEWGVYPMLTQESDRAVWRHQACIYGIEQGILSNYDRILVLSRGACMEETNNLTLTIVNDILTGSEFPET

SEQ ID NO: 1596 - protein, 535 aa, Hordeum vulgare subsp. vulgare
MEVNVKGNYVQVYVMLPLDAVSVNNRFEKGDELRAQLRKLVEAGVDGVMVDVWWGLVEGKGPKAYDWSAYKQLFELVQKAGLKLQAIMSFHQCGGNVGDAVNIPIPQWVRDVGTRDPDIFYTDGHGTRNIEYLTLGVDNQPLFHGRSAVQMYADYMTSFRENMKDFLDAGVIVDIEVGLGPAGEMRYPSYPQSHGWSFPGIGEFICYDKYLQADFKAAAAAVGHPEWEFPNDVGQYNDTPERTQFFRDNGTYLSEKGRFFLAWYSNNLIKHGDRILDEANKVFLGYKVQLAIKISGIHWWYKVPSHAAELTAGYYNLHDRDGYRTIARMLKRHRASINFTCAEMRDSEQSSQAMSAPEELVQQVLSAGWREGLNVACENALPRYDPTAYNTILRNARPHGINQSGPPEHKLFGFTYLRLSNQLVEGQNYVNFKTFVDRMHANLPRDPYVDPMAPLPRSGPEISIEMILQAAQPKLQPFPFQEHTDLPVGPTGGMGGQAEGPTCGMGGQVKGPTGGMGGQAEDPTSGMGGELPATM

SEQ ID NO: 1597 - protein, 463 aa, Bacillus cereus ATCC 14579
MHLHFTPRQIVEKLDQYIIGQKDAKKAVAVALRNRYRRSKLAENLRDEIAPKNILMIGPTGVGKTEVARRMAKLVGAPFIKVEATKFTEVGYVGRDVESMVRDLVETSVRIVKEEMVVKVQDKAEEQANQRLVEILVPSPEKQSGFKNPLEMLFGGAQNSNQTSDTQEDVEIEKKRQDVERKLAAGLLEEEIVSIEVTEQQSSMFDMLQGTGMEQMGMNFQDALGSFMPKKTKKRKLSVKEARKLLSNEEAQRLIDMDEVTQEAVYRAEQLGIIFIDEIDKIAGKQSNSVDVSREGVQRDILPIVEGSNVATKYGSVKTDYILFVAAGAFHMSKPSDLIPELQGRFPIRVELTKLSTDDFVKILIEPDNALIKQYMALLATEGIEIEFSDEAIRKIAEIAYQVNQDTDNIGARRLHTIMEKLLEDLSFEASEITLEKITITPQYVEEKLATIAKNKDVSQFIL

SEQ ID NO: 1598 - protein, 488 aa, Tilia platyphyllos
SGVSTLEKENLGRISQIIGPVLDVAFPPGKMPNIYNALVVKGRDTVGQQINITCEVQQLLGNNRVRAVAMSATDGLMRGMEVIDTGAPLSVPVGGATLGRIFNVLGEPVDNLGPVDTRTTSPIHKPAPAFIQLDTKLSIFETGIKVVDLLAPYRRGGKIGLFGGAGVGKTVLIMELINNIAKAHGGVSVFGGVGERTREGNDLYMEMKESGVINEQNLAESKVALVYGQMNEPPGARMRVGLTALTMAEYFRDVNEQDVLLFIDNIFRFVQAGSEVSALLGRMPSAVGYQPTLSTEMGSLQERITSTKEGSITSIQAVYVPADDLTDPAPATTFAHLDATTVLSRGLAAKGIYPAVDPLDSTSTMLQPRIVGEEHYETAQRVKQTLQRYKELQDIIAILGLDELSEEDRLTVARARKIERFLSQPFFVAEVFTGSPGKYVGLAETIRGFKLILSGELDGLPEQAFYLVGNIDEATAKATNLEMESKLK

SEQ ID NO: 1599 - protein, 593 aa, Saccharomyces exiguus
ISQSLSKYSNSDAIIYVGCFAKGTQVMMADGTDKSIEDIQLGENVMGKDGTPRTVISLPRGKETMYEVCHSSIKGTTNETLMNYVCSGNHKIVMQTPQQIGITEHAIDGKTYTSVSYFALRDSQDGYPIVKKLTKSFEHQQNGGKEQTLITVNNFVASLKSEPINWDVEAKHYESLGHYVKKCSYQLINPVFHQSGKLAQEIASLNYSKDKAPLLAWLIGFWVGNGAMRHSQFVIDSQDIELVNRIQEIATLLNLSATTACYYSGSVDDQDKLAKLNTATGEGFEDDLQSNPTAKELADMDILSESKTATLPTAFGVEKIDELIISLGEGRGNGNVFAQVIGSFGIDLADKDTLVSKIAHELAGDAFEVREQFVAGLVDATGYVRKDVYDHASEATVSIESKSTVLGLVKIARSLGIKIVVTSNDYQDPEDHDHGHDHGSCGHDEVATGYTAVMTGDALTNSMRFCAIGRNRVTAKQFMRQAIPFYFSLEKKSEDDYYGITVPDNTDKQYLLSSMALVHNCGERGNEMAEVLMEFPELFTEINGRKEPIMKRTTLVANTSNMPVAAREASIYTGITLAEYFRDQGKNVSMIAD

SEQ ID NO: 1600 - protein, 613 aa, Acetabularia acetabulum
MSKAKEGDYGSIKKVSGPVVVADNMGGSAMYELVRVGTGELIGEIIRLEGDTATIQVYEETSGLTVGDGVLRTKQPLSVDLGPGILGNIFDGIQRPLKAIADVSGDVFIPRGVNVPSLDQTKQWEFHPSSYRVGDRVTGGDIIGTVPENTLLDHKVMLIPQAKGTITYIAPAGNYNINERIIEVEFQGTKYEYCMKQSWPVRSPRPVVEKLLADTPLLTGQRVLDSLFPGVRGGTCAIPGAFGCGKTVISQALSKYSNSDGIVYVGCGERGNEMAEVLMDFPQLTMTMPDGREESIMKRTTLVANTSNMPVAAREASIYTGITLSEYFRDMGYNFAMMADSTSRWAEALREISGRLAEMPADSGYPAYLGARLASFYERSGRVACIGSPEREGSVTIVGAVSPPGGDFSDPVTSATLGIVQVFWGLDKKLAQRKHFPSVNWLISYSKYLNALEPFYEKFDNDFVDIRQVAREVLQKEDELNEIVQLVGKDALAESDKIILETADFLKEDYLAQNSFTKYDKYCPFYKSVGMMRNIVTFHRLATQAIERTATGNSDGQKLLSNIIKAKLGDLLYKVSSQKFEDPSDGESVVTGRLNELNDELKEKFRALEDEYS

SEQ ID NO: 1601 - protein, 397 aa, Oryza sativa
  unsure (1)..(397): unsure at all Xaa locations
MAAAADAPPPPPEVAPPAPAPAPAPAPYQPPRLAVADGAGGGGGGGGKPCRHHAYSRKQKSLGLLCTNFVALYDREDVESVGLDDAARRLGVERRRIYDIVNVLESIGEMSLRAVSSVASPSLDETSAAXXVSDDEDDDKLDDAEGDAESEKLSLSQSIDNPSDKPDAPPCKPEHRKEKSLGLLTQNFVKLFLTMEIETISLDEAAKRLLGEGQANNMRTKVRRLYDIANVLSSLNLIEKTQQADSRKPAFRWLGQAKRNEGVTVALPPTKTLPNKRAFGTDLTNIDNKRGKLDSTMENRGKPTQDGGNLFNNLQRQLGQENRSDFVYGPFHPAVARKQEHGNRTVQEKERKSIQDWENLASSFRPQYQNPGLNDLFGHYMEAWRSWYSDLRRDRAS

SEQ ID NO: 1602 - protein, 485 aa, Sansevieria socotrana
  unsure (1)..(485): unsure at all Xaa locations
MRINXTTSGPAVSTLDEKTLGRIAQIIGPVLDVVFPPGKMPNIYNALVVKGRDTVGQQINVTCEVQQLLGNNRVRAVAMSATDGLTRGMEVIDTGAPLSVPVGGATLGRIFNVLGEPVDNLGPVDTCTTSPIHRSAPAFIQLDTKLSIFETGIKVVDLLAPYRRGGKIGLFGGAGVGKTVLIMELINNIAKAHGGVSVFGGVGERTREGNDLYMEMKESGVINEKNIAESKVALVYGQMNEPPGARMRVGLTALTMAEYFRDVNEQDVLLFIDNIFRFVQAGSEVSALLGRMPSAVGYQPTLSTEMGSLQERITSTKEGSITSIQAVYVPADDLTDPAPATTFAHLDATTVLSRGLAAKGIYPAVDPLDSTSTMLQPGIVGEEHYETAQKVKQTLQRYKELQDIIAILGLDELSEEDRLTVARARKIERFLSQPFFVAEVFTGSPGKYVGLAETVRGFQLILSETVFLSRPFIWWVTSMKLPRKL

SEQ ID NO: 1603 - protein, 491 aa, Amborella trichopoda
GSGSGLSTLAEKSVGRIAQIIGPVLDVAFPPGKMPNIYNSLVVKGRDTAGQQINVTCEVQQLLGNNRVRTVAMSATDGLMRGMEVIDTGAPLSVPVGEATLGRIFNVLGEPVDNLGPVDTRTTSPIHRSAPAFIQLDTKLSIFETGIKVVDLLAPHRRGGKIGLFGGAGVGKTVLIMELINNIAKAHGGVSVFGGVGERTREGNDLYMEMKESGVINEQNIAESKVALVYGQMNEPPGARMRVGLTALTMAEYFRDVNEQDVLLFIDNISRFVQAGSEVSALLGRMPSAVGYQPTLSTEMGSLQERITSTKEGSITSIQAVYVPADDLTDPAPATTFAHLDATTVLSRGLAAKGIYPAVDPLDSTSTMLQPRIVGEEHYETAQRVKQTLQRYKELQDIIAILGPDELSEEDRLTVARARKIERFLSQPFFVAEVFTGSPGKYVGLAETIRGFQLILSGELDGLPEQAFYLVGNIDEATAKAINLEVESKLK

SEQ ID NO: 1604 - protein, 487 aa, Polyosma cunninghamii
GVSTLEKKNLGRIAQIIGPVLDVAFPPGKMPNIYNALVVKDRDTVGQPISVTCEVQQLLGNNRVRAVAMSATDGLMRGMEVVDTGAPLSVPVGGATLGRIFNVLGEPVDNLGPVDTRTTSPIHRSAPAFIQLDTKLSIFETGIKVVDLLAPYRRGGKIGLFGGAGVGKTVLIMELINNIAKAHGGVSVFGGVGERTREGNDLYMEMKESGVINEQNIAESKVALVYGQMNEPPGARMRVGLTALTMAEYFRDVNEQDVLLFIDNIFRFVQAGSEVSALLGRMPSAVGYQPTLSTEMGSLQERITSTKEGSITSIQAVYVPADDLTDPAPATTFAHLDATTVLSRGLAAKGIYPAVDPLDSTSTMLQPRIVGEEHYEIAQRVKQTLQRYKELQDIIAILGLDELSEEDRLTVARARKIERFLSQPFFVAEVFTGSPGKYVGLAETIRGFQLILSGELDGLPEQAFYLVGNIDEATAKAMNLEMESNLK

SEQ ID NO: 1605 - protein, 242 aa, Malus x domestica
MEFANQAPESSTQKKLGRGKIEIKRIENTTNRQVTFCKRRNGLLKKAYELSVLCDAEVALIVFSTRGRLYEYANNSVRATIDRYKKACADSTDGGSVSEANTQFYQQEASKLRRQIREIQNSNRHILGESLSTLKVKELKNLEGRLEKGISRIRSKKNEILFSEIEFMQKRETELQHHNNFLRAKIAESEREQQQQQTHMIPGTSYDPSMPSNSYDRNFFPVILESNNNHYPRQGQTALQLV

SEQ ID NO: 1606 - protein, 320 aa, Oryza sativa
  unsure (1)..(320): unsure at all Xaa locations
MWRLKVAQGGGALLRSTNGFAGRAVWEFDPDHGTPEDRANVERVRRDFTDHRLRRPESADLLMRMQFARENNHQRRAPAVNKLGEKEQVTEETVMASLRRALDEFSSLQADDGHWPGDLSGAIFIMPVLIFSLYATGSLDTVISSEHRREICRYIYNHQNEDGGWGMLILGSSTMFATCLNYVTLRLIGEEPSNEXXLARGHAWIISHGGATLVPQWGKICLXGKFWGPTRVVYVPMAYLYGKKFVGPITPTILALREEIYTDPYHTIDWAQACNACSKEDLVCPRTLLQNVVWTSLYKWVEPVLGSRPMNKLRERALDX

SEQ ID NO: 1607 - protein, 262 aa, Salmonella typhimurium
MERYENLFAQLNDRREGAFVPFVTLGDPGIEQSLKIIDTLIDAGADALELGVPFSDPLADGPTIQNANLRAFAAGVTPAQCFEMLALIREKHPTIPIGLLMYANLVFNNGIDAFYARCEQVGVDSVLVADVPVEESAPFRQAALRHNIAPIFICPPNADDDLLRQVASYGRGYTYLLSRSGVTGAENHHLIEKLKEYHAAPALQGFGISSPEQVSAAVRAGAAGAISGSAIVKIIEKNLASPKQMLAELRSFVSAMKAASRA

SEQ ID NO: 1608 - protein, 116 aa, Sesbania rostrata
LVNVYPYFSYSGNPRDISLPYALFTSPNVVVWDGQYGYQNLFDAMLDAVHAAIDNTKIGFVPVVVSESGWPSDGGFAATYDNARIYLDNLIRHVGKGTPRRPWPTETYIFAMFDEN

SEQ ID NO: 1609 - protein, 203 aa, Triticum aestivum
  unsure (1)..(203): unsure at all Xaa locations
MAAPKPITRLISHVILDLDGTLLNTDCIVSQVLKPFLVKNGKKWDSKKAHKFVGKTPYEAAAVVLEDYGLPYSTEEFLSLINPMFSEQWGNIKALPGAXNRLIKHLKSSRVPAALASNSSRSNIESKISCQQGWKEYFSAIVGADEVESGKPSPDIFLEAAKRMNADPSNCLVIEDSVPGVTAGKAAGMHVIAVPSVPRPRPR

SEQ ID NO: 1610 - protein, 354 aa, Lycopersicon esculentum
MSCFSCCDDDDMHRATDNGPFMAHNSAGNNGGQRATESAQRETQTVNIQPIAVPSIAVDELKDITDNFGSKALIGEGSYGRVYHGVLKSGRAAAIKKLDSSKQPDREFLAQVSMVSRLKDENVVELLGYCVDGGFRVLAYEYAPNGSLHDILHGRKGVKGAQPGPVLSWAQRVKIAVGAAKGLEYLHEKAQPHIIHRDIKSSNILLFDDDVAKIADFDLSNQAPDMAARLHSTRVLGTFGYHAPEYAMTGQLSSKSDVYSFGVVLLELLTGRKPVDHTLPRGQQSLVTWATPRLSEDKVKQCVDARLNTDYPPKAIAKMAAVAALCVQYEADFRPNMSIVVKALQPLLPRPVPS

SEQ ID NO: 1611 - protein, 485 aa, Dicranostyles mildbraediana
INPTTSGFEVSAVEKKNLGRIVQIIGPVLDVAFPPRKMPNIYNALVVQGRDNNVTCEVQQLLGNNRVRAVAMSDTDGLMRGMEVIDTGAPISVAVGGATLGRIFNVLGEPVDNLGPVDTNTTSPIHRSAPAFIQLDTRLSIFETGIKVVDLLAPYRRGGKIGLFGGAGVGKTVLIMELINNIAKAHGGVSVFGGVGERTREGNDLYMEMKESGVINEENIAESKVALVYGQMNEPPGARMRVGLTALTMAEYFRDVNKQDVLLFIDNIFRFVQAGSEVSALLGRMPSAVGYQPTLSTEMGSLQERITSTKEGSITSIQAVYVPADDLTDPAPATTFAHLDATTVLSRGLAAKGIYPAVDPLDSTSTMLQPRIVGEEHYETAQRVKQTLQRYKELQDIIAILGLDELSEEDRLTVARARKIERFLSQPFFVAEVFTGSPGKYVGLAETIRGFQLILSGELDGLPEQAFYLVGNIDEATAKAMNLKT

SEQ ID NO: 1612 - protein, 498 aa, Oryza sativa (japonica cultivar-group)
MRTNPTTSRPGVSTIEEKSTGRIDQIIGPVLDVTFPRGKLPYIYNALVVKSRDTDGKQINVTCEVQQLLGNNRVRAVAMSATDGLMRGMEVIDTGAPLSVPVGGATLGRIFNVLGEPVDNLGPVDTSATFPIHRSAPAFIELDTKLSIFETGIKVVDLLAPYRRGGKIGLFGGAGVGKTVLIMELINNIAKAHGGVSVFGGVGERTREGNDLYMEMKESGVINEKNLEESKVALVYGQMNEPPGARMRVGLTALTMAEYFRDVNKQDVLLFIDNIFRFVQAGSEVSALLGRMPSAVGYQPTLSTEMGSLQERITSTKKGSITSIQAVYVPADDLTDPAPATTFAHLDATTVLSRGLASKGIYPAVDPLDSTSTMLQPRIVGNEHYETAQRVKQTLQRYKELQDIIAILGLDELSEEDRLTVARARKIERFLSQPFFVAEVFTGSPGKYVGLAETIRGFQLILSGELDGLPEQAFYLVGNIDEASTKAINLEEENKLKK

SEQ ID NO: 1613 - protein, 496 aa, Ruscus aculeatus
MRTNPTTSGPAVSTLDEKNLGRIAQIIGPVLDVVFPPGKMPNIYNALVVKGRDTVGQQINVTCEVQQLLGNNRVRAVAMSATDGLTRRMEVIDTGAPLSVPVGGATLGRIFNVLGEPVDNLGPVDTRTTSPIHRSAPAFIQLDTKLSIFETGIKVVDLLAPYRRGGKIGLFGGAGVGKTVLIMELINNIAKAHGGVSVFGGVGERTREGNDLYMEMKESGVINEKNIAESKVALVYGQMNEPPGARMRVGLTALTMAEYFRDVNEQDVLLFIDNIFRFVQAGSEVSALLGRMPSAVGYQPTLSTEMGSLQERITSTKEGSITSIQAVYVPADDLTDPAPATTFAHLDATTVLSRGLASKGIYPAVDPLDSTSTMLQPGIVGEEHYETAQKVKQTLQRYKELQDIIAILGLDELSEEDRLTVARARKIERFLSQPFFVAEVFTGSPGKYVGLAETVRGFQLILSGELDSLPEQAFYLVGNIDEATAKAMNLEGEKKM

SEQ ID NO: 1614 - protein, 272 aa, Oryza sativa
  unsure (1)..(272): unsure at all Xaa locations
MGALPRALVLGVCAAVLLVNVLAVAADGDAAAAASGVVGRAAKCADCTGKNMKAEAVFKEVRVANKCKKTNGXYETKATGEVGKSGAFAVPLAADLLGDDGELRQQCFAQLHSAASNQPCPGQEPSWIVNAAADKKKTFVAVAGDTHFPSSECASAFLCDPFHKKDFFFHYKNPSPPAPAAYHKPPPSYTHPAPPVYSYPTPAYSHPTPVYKQPLPTPSPPIYHPPAEEKKVAMQDDAEADPELFKKLLPLIKKNPFLKFPKLPPVEVEAKP

SEQ ID NO: 1615 - protein, 484 aa, Kiggelaria africana
GVSALEKKNLGRIAQIIGPVLDVAFPPGKMPNIYNALVVKGRDTIGQQINVTCEVQQLLGNNRVRAVAMSATDGLMRGMEVIDTGAPLSVPVGGATLGRIFNVLGEPVDDLGPVDTHTTSPIHRSAPAFIQLDTKLSIFETGIKVVDLLAPYRRGGKIGLFGGAGVGKTVLIMELINNIAKAHGGVSVFGGVGERTREGNDLYMEMKESGVINEENIAESKVALVYGQMNEPPGARMRVGLTALTMAEYFRDVNEQDVLLFIDNIFRFVQAGSEVSALLGRMPSAVGYQPTLSTEMGSLQERITSTKEGSITSIQAVYVPADDLTDPAPATTFAHLDATTVLSRGLAAKGIYPAVDPLDSTSTMLQPQIVGEEHYETAQRVKQTLQRYKELQDIIAILGLDELSEEDRLTVSRARKIERFLSQPFFVAEVFTGSPGKYVGLAETIRGFKLILSGELDSLPEQAFYLVGNIDEATAKAMNLETEN

SEQ ID NO: 1616 - protein, 578 aa, Methanosarcina barkeri
MEVKGEIYRVSGPVVTVTGLQAKMYDLVKVGDEGLMGEVIQILGPKTIIQVYEETAGIKPGEPCYSTGSSLSVELGPGLLSSIYDGVQRPLHVLLERTGGFIGRGVTADGLDHKKLWEFKPVAKKGDSVKGGDVIGVVQETVNIEHKIMVPPDISGTISDIKSGNFTVVDTICTLTDGTELQMMQKWPVRRPRPVRTKLTPTRPLVTGMRILDGLFPVAKGGTAAIPGPFGSGKTVTQQSLAKWSDTEIVVYIGCGERGNEMADVLSEFPELEDPQTGRPLMERTVLIANTSNMPVAAREASVYTGITIAEYFRDMGLDVSLMADSTSRWAEAMREISSRLEEMPGEEGYPAYLSARLAEFYERAGVAESLCGETGSITVIGAVSPPGGDFSEPVTQNTLRIVKVFWALDAKLSQRRHFPAINWLNSYSLYKDSLNDWFADNVAPDYVPLRERAMEMLQTESELQEIVQLVGSDALPDDQQLLLEITRMLREIFLQQNAFHPVDAYSPFAQQYRILKAIMKWGDAAMEALKSGVPVPEILKLESKNVLAKVKYEEKFDESMNAVLTQMDKEFASLRGR

SEQ ID NO: 1617 - protein, 409 aa, Medicago truncatula
MAIPKLVPGFRFSPTGVELIKYFLKRKVMGKKVLNDVIAELDIYKYAPWDLPDLSYLQNGDLEWYFFCPIEKKYGNGSRMNRATEIGFWKATGKDRAVQQNNQTVGMIKTLIFHTGKAPRGDRTDWVMHEYRLEDKDLADKGIVQDSYVICKVFQKEGPGPRNGAQYGRPFNEEDWSDDEVGTPFAEPAALAPTLPVTSNSFVLNDQNLHAIGYNGSISMPCQSGLVPSPDPANSCQTGLPPSPDPANSSQIGLTPSPDPVNSCQTGFMSSPDPSNSCQTGYMPYPDSANECQIGFMSPDPANSHQTGLVLSPPDPVNSHLTGLVPSPDPVDNSYLENQAVNTDNILSMLDMFNDNDILPEENIAEGALSTDFFEVWETWIAWDLLARMLTLAHTVWLLRVMTTWISWS

SEQ ID NO: 1618 - protein, 763 aa, Oryza sativa
  unsure (1)..(763): unsure at all Xaa locations
MSRGGGGCCPSMDLMRSEAMQLVQXXKDVRTARSLARFLLDRGGGGFVRLNADKSPFQRTYASQIKRCGEMARKLRFFREQMSKAAIATSTQFSGTSLEIDDLEVKLGELEVELTEVNANNDKLQRTYNELVEYNIVLQKEMVTDPSKQVKLGSLSGLVPKEKAMAFERILFRATRGNMFLRQEPVDETVTDPLSGEKVIKNAFVIFYSGERAKSKIVKICDAFGANRYPFPEDLGKQLQTIQEVSGKISELKATIEIGLAHRDSILKNISSEFEQWNTLVKKEKAIYHTLNMLSLDVTKKCLVAEGWSPVFATSQIQDALQRATVDSKSQVGSIFQVLNTQESPPTFFQTNKFTSAFQEIVDAYGIAKYQEANPGVFTIVTFPFLFAIMFGDWGHGICLLLATLYLIIREKKLASQKLDDIMDMMFGGRYVILMMSLFSIYTGLIYNEFFSVPFELFGKSAYACRDPSCGDATTEGLIKVRPAYSFGVDPVWHGSRSELPFLNSLKMKLSILIGVAQMNLGIMMSYFNAKFFRNAINVWYQFIPQLIFLNSLFGYLSLLIIIKWCTGSKADLYHVMIYMFLSPTDDLGENELFPGQKLVQLVLLLLALVSVPWMLIPKPFFLKKQHEQRHQGQQYTMLQATDESVTVEEHQDDPHHHEEFEFSEVFVHQLIHTIEFVLGAVSNTASYLRLWALXXYNNIFILIIGAVIFLFATIGVLLVMETLSAFLHALRLHWVEFQNKFYEGDGYKFVPFAFASIIEEED

SEQ ID NO: 1619 - protein, 215 aa, Vibrio vulnificus CMCP6
MKFNAAIFDMDGLLLDTERVCMRIFKQACDVQNLPFYQETYLSIIGRNSAGIDAILRAAYGDDLDRLHAEWRKRYNQVVLHEAIPVKEGVIALLEWLKAHQIPAAVATSTQKDVALVKLKLAGLDHYFESITTGCEVTHGKPDPEIYLLAASRLNVPPAQCLAFEDSNNGVRAAVAANMMTYQIPDLVEPCEEVIAFGHRICPSLTEVLKELQPD

SEQ ID NO: 1620 - protein, 78 aa, Rhizobium etli
MTARMDKRFAELKAEGRPALVTYFMGGDPDYDTSLGIMKALPEAGSDIIELGMPFSDPMADGPAIQLAGQRALKGGQT

SEQ ID NO: 1621 - protein, 248 aa, Arabidopsis thaliana
MEEGGSSHDAESSKKLGRGKIEIKRIENTTNRQVTFCKRRNGLLKKAYELSVLCDAEVALVIFSTRGRLYEYANNSVRGTIERYKKACSDAVNPPSVTEANTQYYQQEASKLRRQIRDIQNSNRHIVGESLGSLNFKELKNLEGRLEKGISRVRSKKNELLVAEIEYMQKREMELQHNNMYLRAKIAEGARLNPDQQESSVIQGTTVYESGVSSHDQSQHYNRNYIPVNLLEPNQQFSGQDQPPLQLV

SEQ ID NO: 1622 - protein, 133 aa, Oryza sativa
  unsure (1)..(133): unsure at all Xaa locations
XVAAGKAAGMHVIAVPSANLPAENFSDVLSEHTSGVYFGWAGLSTRXXPWLLHDFGEDFYGEELRLVIVGYIRPEANFPSLESLIERIHEDARISDKALNLPLYAKYKDSPYLRNSLKEDNSANGNQSVIDSK

SEQ ID NO: 1623 - protein, 578 aa, Methanosarcina mazei Goe1
MEVKGEIYRVAGPVVTAIGLDAKMYDLCKVGNEGLMGEVIQIVGDKTIIQVYEETGGVRPGEPCVTTGMSLAVELGPGLLSSIYDGVQRPLHVLLERTGGFIGRGVTADGLDHKKLWEFKPVVKKGDRVIGGDVIGVVQETVNIEHKIMVRPDISGTVADIKSGSFTVVDTICTLTDGTELQMMQRWPVRKPRPVKRKLTPEKPLVTGQRILDGLFPVAKGGTAAIPGPFGSGKTVTQQQLSKWSDTEIVVYIGCGERGNEMADVLWEFPELEDPQTGRPLMERTILVANTSNMPVAAREASVYTGMTLAEYFRDMGYDVSLMADSTSRWAEAMREISSRLEEMPGEEGYPAYLSARLAEFYERAGVAETLCGEKGSITAIGAVSPPGGDFSEPVTQNTLRIVKVFWALDAKLSQKRHFPAINWLNSYSLYKEDLNDWFTENVAPDYVPMRERAMDMLQTESELQEIVQLVGSDALPEEQQLLLEITRMIREIFLQQNAFHPIDTYSPFEKQYKIMKAIMKWGDAAMDALKSGVLSSEILKMQSKDELPKVKFEEDFEGSLNAVLAKMDKEFAALGGK

SEQ ID NO: 1624 - protein, 268 aa, Pseudomonas aeruginosa PAO1
MSRLQTRFAQLKQENRAALVTFVTAGDPDYASSLEILKGLPAAGADVIELGMPFTDPMADGPAIQLANIRALDGGQTLARTLQMVREFRSGDSETPLVLMGYFNPIHHYGVERFIAEAKEVGVDGLIVVDLPPEHNEDLCHPAQAAGIDFIRLTTPTTGDQRLPTVLEGSSGFVYYVSVAGVTGANAATLEHVEEAVARLRRHTDLPIGIGFGIRSAEHAAAVARLADGVVVGSALIDRIAKARDNAQAVKDVLALCGELAEGVRNAR

SEQ ID NO: 1625 - protein, 422 aa, Coxiella burnetii RSA 493
MSSDEKLQILYCSFCGKSQHQVRKLIAGPAVFVCNECVDLCNDIIREEEIAQAGGAQKKLPTPPEIHRMLDEYVIGQEFAKKVLSVAVYNHYKRLGNQTKKDSVEISKSNILLIGPTGSGKTLLAQTLAKILDVPFAIADATTLTEAGYVGEDVENIIQKLLQKCNYDVEKAKTGIIYIDEIDKIARKTDSPSLTRDVSGEGVQQALLKLIEGTVASIPPQGGRKHPQQEYLQVDTSNILFICGGAFADLHKIIQRRTDKSGIGFAAEVRPKEDFSREASKLIKQTEPGDLIKYGLIPEFVGRLPIITTLEELDEDALMRILTEPKNALVKQYRKLFEFEGVEIDFREDALKAIAKRAIQQKTGARGLRSIVEHTLLDLMYDLPGVAAGLRKVVIDSGVIDQASPPIFIYHHEKASRKVAQE

SEQ ID NO: 1626 - protein, 477 aa, Grammadenia sp. Stahl 1579
MRINPTTSGPGASVLEKKKPGRIIQIIGPVLDVSFPPGKMPNIYNALVVKGRDTAGQPINVTCEVQQLLGNNRVRAVAMSATDGLTRGMEVIDTGAALSVPVGGATLGRIFNVLGEPVDNLGPVDTRTTSPIHRSAPAFIQLDTKLSIFETGIKVVDLLAPYRRGGKIGLFGGAGVGKTVLIMELINNIAKAHGGVSVFGGVGERTREGNDLYMEMKESGVINEENIAESKVALVYGQMNEPPGARMRVGLTALTMAEYFRDVNEQDVLLFIDNIFRFVQAGSEVSALLGRMPSAVGYQPTLSTEMGSLQERITSTKEGSITSIQAVYVPADDLTDPAPATTFAHLDATTVLSRGLAAKGIYPAVDPLDSTSTMLQPRIVGEEHYEIAQRVKQTLQRYKELQDIIAILGLDELSEEDRLTVARARKIERFLSQPFFVAEVFTGSPGKYVGLAETIRGPPLILSGELDGIPEQAFYLV

SEQ ID NO: 1627 - protein, 264 aa, Synechocystis sp. PCC 6803
MNAVAACFNALRQRGECALIPFLTAGDPDLATTAEALRILDRAGADLIELGVPYSDPLADGPVIQAAATRALQKGVKLDDVLAIVREVHQDIAAPIILFTYYNPIFYQGVEVFLDKIKAAGVKGLVVPDLPLEESDRLLEATAERGLELILLVAPTSSPERQTAIAKKSQGFVYLVSVTGVTGVRTEVGSRVEALLAGMRQVTDKPIGVGFGISQPEQAEQVKAWGADAVIVGSAMVKRLAEGTPTEGLQALETFCRELKTAIS

SEQ ID NO: 1628 - protein, 449 aa, Heliamphora sp. Anderberg s.n.
MPNIYNALLVKGRDTGGQPINVTCEVQQLLGNNRVRAVAMSATDGLTRGMEVIDTGAPLSVPVGGATLGRIFNVLGEPVDNLGPVDTRTTSPIHRSAPAFIQLDTKLSIFETGIKVVDLLAPYRRGGKIGLFGGAGVGKTVLIMELINNIAKAHGGVSVFGGVGERTREGNDLYMEMKESGVINEQNIAESKVALVYGQMNEPPGARMRVGLTALTMAEYFRDVNEQDVLLFIDNIFRFVQAGSEVSALLGRMPSAVGYQPTLSTEMGSLQERITSTKEGSITSIQAVYVPADDLTDPAPATTFAHLDATTVLSRGLAAKGIYPAVDPLDSTSTMLQPRIVGEEHYETAQRVKQTLQRYKELQDIIAILGLDELSEEDRLTVARARKIERFLSQPFFVAKVFTGSPGKYVGLAETIRGFQLILSGELDGLPEQAFYLVGNIDEATAKAM

SEQ ID NO: 1629 - protein, 476 aa, Shepherdia canadensis
  unsure (1)..(476): unsure at all Xaa locations
VPALEKKNLGRIAQIIGPXLDVXFPPGKMPNIYNALIVKGRDTLGQEINLTCEVQQLLGNNRVRAVAMSATEGLMRGMEVIDTGAPLSVPVGGATLGRIFNVLGEPIDNLGPVDTRTTSPIHRSAPAFIQLDTKLSIFETGIKVVDLLAPYRRGGKIGLFGGAGVGKTVLIMELINNIAKAHGGVSVFGGVGERTREGNDLYMEMKESGVINEQNIAESKVALVYGQMNEPPGARMRVGLTALTMAEYFRDVNEQDVLLFIDNIFRFVQAGSEVSALLGRMPSAVGYQPTLSTEMGSLQERITSTKEGSITSIQAVYVPADDLTDPAPATTFAHLDATTVLSRGLAAKGIYPAVDPLDSTSTMLQPRIVGEEHYETAQRVKQTLQRYKELQDIIAILGLDELSEEDRLTVARARKIERFLSQPFFVAEVFTGSPGKYVGLAETIRGFKLILSGELDGLPEQAFYLVGNIDEATAXX

SEQ ID NO: 1630 - protein, 592 aa, Petunia x hybrida
MMRIAVRYCLNGNPFFSFFAYSIAPRHYSTNTRSISVKGNFGVSNEFENVKCLDDAFSLFRQMVRTKPLPSVVSFSKLLKALVHMKHYSSVVSLFREIHKLRIPVHEFILSIVVNSCCLMHRTDLGFSVLAIHFKKGIPFNQVIFNTLLRGLFAENKVKDAVHLFKKLVRENICEPNEVMYGTVMNGLCKKGHTQKAFDLLRLMEQGSTKPNTCIYSIVIDAFCKDGMLDGATSLLNEMKQKSIPPDIFTYSTLIDALCKLSQWENVRTLFLEMIHLNIYPNVCTFNSVIDGLCKEGKVEDAEEIMRYMIEKGVDPDVITYNMIIDGYGLRGQVDRAREIFDSMINKSIEPNIISYNILINGYARQKKIDEAMQVCREISQKGLKPSIVTCNVLLHGLFELGRTKSAQNFFDEMLSAGHIPDLYTHCTLLGGYFKNGLVEEAMSHFHKLERRREDTNIQIYTAVIDGLCKNGKLDKAHATFEKLPLIGLHPDVITYTAMISGYCQEGLLDEAKDMLRKMEDNGCLADNRTYNVIVRGFLRSNKVSEMKAFLEEIAGKSFSFEAATVELLMDIIAEDPSLLNMIPEFHRDNKK

SEQ ID NO: 1631 - protein, 470 aa, Geobacter metallireducens
MSQNFGRISQVIGAVIDVEFEPGKLPPIYNALRVTNPAIDDKEYNLVLEVAQHLGENSVRTIAMDSTDGLVRGQAALDTGKQISVPVGRKTLGRILNVIGEPVDEMGPVNAEKEYGIHRESPSFVDQSTKVEAFTTGIKVVDLLAPYARGGKIGLFGGAGVGKTVLIMELINNIAKQHGGFSVFAGVGERTREGNDLWMEMKESGVLDKAALVYGQMNEPPGARARVALSALSIAEYFRDEEGQNVLLFIDNIFRFTQAGSEVSALLGRIPSAVGYQPTLATEMGELQERITSTTKGSITSVQAIYVPADDLTDPAPATAFAHLDATTVLSRQIAELGIYPAVDPLDSTSRILDPQVIGEEHYAIARQVQYVLQKYKDLQDIIAILGMDELSEEDKLVVARARKIQRFLSQPFHVAEAFTGSPGKYVELKDTIKGFQEIVAGKHDDIPEQAFYMVGTIEEALEKAKKLAA

SEQ ID NO: 1632 - protein, 564 aa, Emericella nidulans
MAPSGKGSSSSEDAQLGAVFSVSGPVVVAENMIGCAIAGLTVGDPVMRTGKPLSVELGPGLMETIYDGIQRPLKAISDESGSIYIPRGIKVNALDRKKKWDFKPGKYKVGDHITGGDIWGTVFENSLLNDHKILLPPRAKGTITRIAEAGSYTVEEQLLEIEFNGVKTTHGMMHTWPVRVPRPVNEKQSADSPFIVGQRVLDSLFPSVLGGTVCIPGAFGCGKTVISQSVSKFSNSDVIVYVGCGERGNEMAEVLMDFPELSIDIGGRKEPIMKRTCLIANTSNMPVAAREASIYTGITIAEYFRDQGKNVAMMADSSSRWAEALRELSGRLGEMPADQGFPAYLGAKLASFYERAGKSTALGSPEREGSVSIVAAVSPPGGDFSDPVTTSTMSIVQVFWGLDKKLAQRKHFPSINTGISYSKYTPVLDRYYEKHHPEFPRLREQVRELLSKSEDLDQVVQLVGKAALGDSDKITLDVAAMVKDDFLQQNGYSDYDQFCPLWKTEYMMKAFMGYHDEAQKAIAQGQSWPKVRDATTDIQTSLRNMKFEVPDNQEEVSAKVRTID

SEQ ID NO: 1633 - protein, 159 aa, Pleurotus ostreatus
  unsure (1)..(159): unsure at all Xaa locations
WEECLKIRNILGEFEEYSCSSQSPYAQWGHKEFLKSPVAIVGTREYIFSENIGVLGDIAAGKEQTFGTMTARALAWIGGKLHYGHPDFLNATFMTTRGGVSKAQKGLHLNEDIFAGMNAFGRGGRIKHSEYYQCGKGRDLGFGTILNFQTKIGTGMGEX

SEQ ID NO: 1634 - protein, 256 aa, Bacteroides thetaiotaomicron VPI-5482
MNRINQLFNSNKKDILSIYFCAGNPTLDGTVNVIRTLEKHGVSMIEVGIPFSDPMADGIVIQNAATQALRNGMSLKILFEQLRNIRQEVSIPLVFMGYLNPIMQFGFENFCRKCVECGIDGVIIPDLPFRDYQDHYRIIAERYGIKVIMLITPETSEERVREIDAHTDGFIYMVSSAATTGAQQDFNEQKRAYFKKIEDMNLRNPLMVGFGISNKATFQAACEHASGAIIGSRFVTLLEEEKDPEKAILKLKDALK

SEQ ID NO: 1635 - protein, 410 aa, Hordeum vulgare
MAAMWSPIIGLLLLLLPLGPSSAINFPLEGNVYPVGHFYATLNIGEPAKPYFLDVDTGSNLTWLECHPPVHGCKGCHPRPPHPYYTPADGKLKVVCGSPLCVAVRRDVPGIPECSRNDPHRCHYEIQYVTGKSEGDLATDIISVNGRDKKRIAFGCGYKQEEPPDSPPSPVNGILGLGMGKAGFAAQLKGLKMIKENVIGHCLSSKGKGVLYVGDFNPPTRGVTWAPMRESLFYYSPGLAEVFIDKQPIRGNPTFEAVFDSGSTYTHVPAQIYNEIVSKVRGTFSESSLEEVKGRALPLCWKGKKPFGSVNDVKNQFKALSLKITHARGTNNLDIPPQNYLFVKEDGETCLAILDASLDPVLKELNFILIGAVTMQDLFVIYDNEKKQLGWVRAQCDRVQELESVIDSRL

SEQ ID NO: 1636 - protein, 243 aa, Magnetospirillum magnetotacticum
MDSGVDVLELGIPYTDPVMDGPVIQAAAQAALDGGARVADVFRVVAAVAERTGGRVPVLVMTYWNPVLRYGVDAFARDLAAAGGAGLITADLVPDEGRAWLDAAEAHGLDRVFLVAPSSTPERLRLTARASRGFVYAASTMGVTGVRAAVGPQAARLVADTRAAGAELVCVGLGVSTAEQAAEVARYADGVIVGSAFVRPLLGDAPWDERLAALRTVAASLAAGVRSARQEQPGTTTPGGVVA

SEQ ID NO: 1637 - protein, 414 aa, Neisseria meningitidis Z2491
MSNENRTCSFCGKSKSHVKHLIEGENAFICDECVSNCIEILHEDGNDGTPSESAGGEPEESGKLPTPAEIVANLNDHVIGQEQAKKALAVSVYNHYKRLRHPKARANVELSKSNILLIGPTGSGKTLLAQSLARKLDVPFVMADATTLTEAGYVGEDVEQIITKLLGKCDFDVEKAQRGIVYIDEIDKISRKSDNPSITRDVSGEGVQQALLKLIEGTVASVPPQGGRKHPNQEFINVDTTNILFICGGAFAGLEKVIRQRTEKGGIGFGASVHSKDENADITKLFGIVEPEDLIKFGLIPELIGRLPVIATLEELDEDALINILTEPKNALVKQYQALFGMENVELEFEEGALRSIARQAMERKTGARGLRSIVERCLLDTMYRLPDLQGLKKVVVGKAVIEEGREPELVFES

SEQ ID NO: 1638 - protein, 496 aa, Chlamydia trachomatis
MFYSLIPVSRFMIARTKIICTIGPATNTPEMLEKLLDAGMNVARLNFSHGTHESHGRTIAILKELREKRQVPLAIMLDTKGPEIRLGQVESPIKVQPGDRLTLVSKEILGSKESALLFIQVVYSPYVRERAPVLIDDGYIQAVVVNAQEHMVEIEFQNSGEIKSNKSLSIKDIDVALPFMTEKDIADLKFGVEQELDLIAASFVRCNEDIDSMRKVLESFGRPNMPIIAKIENHLGVQNFQEIARAADGIMIARGDLGIELSIVEVPGLQKFMARASRETGRFCITATQMLESMIRNPLPTRAEVSDVANAIYDGTSAVMLSGETASGAHPVHAVKTMRSIIQETEKTFDYHAFFQLNDKNSALKVSPYLEANWVFWIQIAEKASAKAIIVYTQTGGSPMFLSKYRPYLPIIAVTPNRNVYYRLAVEWGVYPMLTLESNRTVWRHQACVYGVEKGILSNYDKILVFSRGAGMQDTNNLTLTTVHDALSPSLDEIVP

SEQ ID NO: 1639 - protein, 370 aa, Chrysobalanus icaco
VDNLGPVDTRTTSPIHRSAPAFIQLDTKLSIFETGIKVVDLLAPYRRGGKIGLFGGAGVGKTVLIMELINNIAKAHGGVSVFGGVGERTREGNDLYMEMKESGVINEENIAESKVALVYGQMNEPPGARMRVGLTALTMAEYFRDVNEQDVLLFIDNIFRFVQAGSEVSALLGRMPSAVGYQPTLSTEMGSLQERITSTKEGSITSIQAVYVPADDLTDPAPATTFAHLDATTVLSRGLAAKGIYPAVDPLDSTSTMLQPQIVGEEHYETAQRVKQTLQRYKELQDIIAILGLDELSEEDRLTVARARKIERFLSQPFFVAEVFTGSPGKYVGLAETIRGFKLILSGELDSLPEQAFYLVGNIDEATAKA

SEQ ID NO: 1640 - protein, 494 aa, Itea ilicifolia
  unsure (1)..(494): unsure at all Xaa locations
PTXSDPGVSTLEKKNQGRIAQIIGPVLDVVFPPGKMPNIYNALVVKGRDTVGQQINVTCEVQQLLGNNRVRAVAMSATDGLMRGMEVIDMGAPLSVPVGGATLGRIFNVLGEPVDNLGPVDTSTTSPIHRSAPAFIQLDTKLSIFETGIKVVDLLAPYRRGGKIGLFGGAGVGKTVLIMELINNIAKAHGGVSVFGGVGERTREGNDLYMEMKESGVINEENIAESKVALVYGQMNEPPGARMRVGLTALTMAEYFRDVNEQDVLLFIDNIFRFVQAGSEVSALLGRMPSAVGYQPTLSTEMGSLQERITSTKEGSITSIQAVYVPADDLTDPAPATTFAHLDATTVLSRGLAAKGIYPAVDPLDSTSTMLQPRIVGEEHYETAQRVKQTLQRYKELQDIIAILGLDELSEEDRLTVARARKIERFLSQPFFVAEVFTGSPGKYVGLAETIRGFQLILSGELDGLPEQAFYLVGNIDEATAKAMNLEMENNLKK

SEQ ID NO: 1641 - protein, 462 aa, Nicotiana sylvestris
MVASPDNNAADGRTVKNKRPIDEWLPITSSRNGQNGGYSAFHNVTAMVGAGVLGLPYAMSELGWGPGVTVMVVSWVITLYTLWQMVECKKCPGMLAGTCIDDHKLAVSNVFGNKLGLWIVVPQQLVVEVGIDIVYMVTGGKSFQKSIVLVCKDNCKDIKLTYYIMIFASVHFVLSHLPNFNAISGVSLVAAIMSLSYCTIAWGASIVLGVQPDVEYEYRAENTGEGIFNFFSGLGEVAFAYAGHNVVLEIQATIPSTPEKPSKGPMWKGVLVAYIIVALCYFPVAIIGYWIFGNSVSNNILISLEKPTWLIVLANAFVVITLLGAYQLYAIPVFDMLETYLVRKLKFKPTWYLRFMTRNLYVAFTMFVGIIFPFLWGLLGFLGGFAFAPTTYFLPCIMWLSIYKPKRWGLSWTSNWICIIVGVMLTVLAPIGGLRTIIIQAKDYNFFYWDSLSGSLAFGKKG

SEQ ID NO: 1642 - protein, 231 aa, Corynebacterium glutamicum ATCC 13032
MIKAIFWDMDGTMVDSEPQWGIATYELSEAMGRRLTPELRELTVGSSLPRTMRLCAEHAGITLSDADYERYRAGMFARVHELFDESLVPNPGVTELLTELKALEIPMLVTTNTERDLATRSVAAVGNEFFIGSIAGDEVPTAKPAPDMYLEAARRVGFDPSECLVFEDSYNGMLGAVTAGCRVIGLHPEEVQAPEGVVPLRSLHGKNSFEGVTAEMVTAWYHQIEPAGVAK

SEQ ID NO: 1643 - protein, 43 aa, Glycine max
MASGATCVQRLDGSRDSAIHTKYRISLRSSSIQEPRYPLPRVM

SEQ ID NO: 1644 - protein, 213 aa, Triticum aestivum
MEIAMVCTRVNLLILILSLCSPYKFIQSPMDFGPLNLLPTTIAASSDFGRILFHSPSAVLKPQSPRDISLLLSFLSASSLGKVTVAARGAGHSIHGQAQALDGIVVEMRSLPAEIELHKGGEGDASYADVSGGAMWIELLEQSLKAGLAPRSWTDYLYITIGGTLSNAGISGQTFKHGPQISNVLQLEVVTGRGETVTCSPTKNAELFSAVLG

SEQ ID NO: 1645 - protein, 346 aa, Hydrogenophilus thermoluteolus
MRHTKIVATLGPASSDPATLERLLLAGVDVVRLNFSHGTADEHRARASLVRALAQQTQRPVGILGDLQGPKIRIGRFTTNAVTLSKGQRFRLDCDLAPGDATRVGLDYPELIDDVEVGDILLLDDGKIRLQIVEKCADALITQVLVGGTLSNHKGINKLGGGLSAPALTAKDRAVPISRSLPKSASITVAVSFVKHAEEMHEARHLARAAGSRARLIAKIERVEAIANLDAILEASDGVMVARGDLAVEVGDAAVPALQKRILRRAREMNRLSITATQMMESMVHSPVPTRAEVSDVANAVLDGTDAVMLSAETAAGQYPVEAVEAMARVCAEATRRTTPTSTRSS

SEQ ID NO: 1646 - protein, 348 aa, Phaseolus vulgaris
QIGVCYGMMGNNLPSANEVINLYRSNNIRRMRLYDPNQAALQALRNSGIELILGVPNSDLQGLATNADTARQWVQRNVLNFWPSVKIKYIAVGNEVSPVGGSSWYAQYVLPAVQNVYQAVRAQGLHDQIKVSTAIDMTLIGNSYPPSQGSFRGDVRSYLDPIIGYLLYASAPLHVNVYPYFSYSGNPRDISLPYALFTSPNVVVRDGQYGYQNLFDAMLDSVHAAIDNTRIGYVEVVVSESGWPSDGGFGATYDNARVYLDNLVRRAGRGSPRRPSKPTETYIFAMFDENQKSPEIEKHFGLFKPSKEKKYPFGFGAQRMQRLLLMSSMQHIPLRVTCKLEPSSQSLL

SEQ ID NO: 1647 - protein, 419 aa, Chlamydia trachomatis
MTKKNLAVCSFCGRSEKDVEKLIAGPSVYICDYCIKLCSGILDKTPAPATQEIATSSTSSPTSLRVLTPKEIKRHIDSYVIGQERAKKTISVAVYNHYKRIRALMQDKQVSYGKSNVLLLGPTGSGKTLIAKTLAKILDVPFTIADATTLTEAGYVGEDVENIVLRLLQAADYDVARAERGIIYIDEIDKIGRTTANVSITRDVSGEGVQQALLKIIEGTVANIPPKGGRKHPNQEYIRVNTENILFIVGGAFVNLDKIIAKRLGRTTIGFSEETDLAVTNRDHLLAKVETEDLIAFGMIPEFIGRFNCVVNCEELTLDELVEILTEPANAIVKQYTELFEEENVKLIFEKEALYAIAQKAKQAKTGARALGMILENLLRDLMFEIPSDPTVEAIRIEEDTITQNKPPVIIQKSPEAIA

SEQ ID NO: 1648 - protein, 1021 aa, Arabidopsis thaliana
MFSAALETMEEVQPPVTPPIEPNGKRSEASLLDICEKVLSLDGSTCDEALKLFTETKRILSASMSNIGSGTREEVERFWFAFILYSVKRLSVRKEADGLSVSGDNEFNLCQILRALKLNIVDFFKELPQFVVKAGSVLGELYGADWENRLQAKEVQANFVHLSLLSKYYKRGFREFFLTYDANAEKNSANSSTYLLDSYRFGWLLFLALRNHAFSRFKDLVTCSNGVVSILAILIIHVPCRFRNFSIQDSSRFVKKGDKGVDLVASLCKIYDASEDELRIVIDKANNLVETILKKKPSPASECQTDKLDNIDPDGLTYFEDLLEETSISTSLITLEKDYYDGKGELDERVFINEEDSLLGSGSLSAGAVNITGVKRKIDALSSPARTFISPLSPHKSPAAKTNGISGATKLAATPVSTAMTTAKWLRTVISPLLPKPSPGLEHFLKSCDRDITNDVTRRAHIILEAIFPNSSLGAQCGGGSLQAVDLMDDIWAEQRRLEACKLYYRVLEAMCKAEAQILHANNLNSLLTNERFHRCMLACSAELVLATHKTITMLFPAVLERTGITAFDLSKVIESFIRHEDSLPRELRRHLNSLEERLLESMVWEKGSSMYNSLIVARPSLALEINQLGLLAEPMPSLDAIAALINFSDGANHASSVQKHETCPGQNGGIRSPKRLCTDYRSILVERNSFTSPVKDRLLALGNVKSKMLPPPLQSAFASPTRPNPGGGGETCAETGINIFFTKINKLAAVRINGMVERLQLSQQIRESVYCFFQHVLAQRTSLLFSRHIDQIILCCFYGVAKISQMSLTFREIIYNYRKQPQCKPLVFRSVYVDALQCRRQGRIGPDHVDIITFYNEIFIPAVKPLLVELGPVRNDRAVEANNKPEGQCPGSPKVSVFPSVPDMSPKKVSAVHNVYVSPLRGSKMDALISHSTKSYYACVGESTHAYQSPSKDLSAINNRLNNSSSNRKRTLNFDAEAGMVSDSMVANSLNLQNQNQNQNGSDASSSGGAAPLKTEPTDS

SEQ ID NO: 1649 - protein, 498 aa, Spinacia oleracea
MRINPTTSDPGVSTLEKKNLGRIAQIIGPVLNVAFPPGKMPNIYNALIVKGRDTAGQPMNVTCEVQQLLGNNRVRAVAMSATDGLTRGMEVIDTGAPLSVPVGGPTLGRIFNVLGEPVDNLRPVDTRTTSPIHRSAPAFTQLDTKLSIFETGIKVVNLLAPYRRGGKIGLFGGAGVGKTVLIMELINNIAKAHGGVSVFGGVGERTREGNDLYMEMKESGVINEQNIAESKVALVYGQMNEPPGARMRVGLTALTMAEYFRDVNEQDVLLFIDNIFRFVQAGSEVSALLGRMPSAVGYQPTLSTEMGSLQERITSTKEGSITSIQAVYVPADDLTDPAPATTFAHLDATTVLSRGLAAKGIYPAVDPLDSTSTMLQPRIVGEEHYEIAQRVKETLQRYKELQDIIAILGLDELSEEDRLTVARARKIERFLSQPFFVAEVFTGSPGKYVGLAETIRGFQLILSGELDSLPEQAFYLVGNIDEATAKAMNLEMESKLKK

SEQ ID NO: 1650 - protein, 533 aa, Hordeum vulgare subsp. vulgare
VNVKGNYVQVYVMLPLDAVSVNNRFEKGDELRAQLRKLVEAGVDGVMVDVWWGLVEGKGPKAYDWSAYKQLFELVQKAGLKLQAIMSFHQCGGNVGDAVNIPIPQWVRDVGTRDPDIFYTDGHGTRNIEYLTLGVDNQPLFHGRSAVQMYADYMTSFRENMKDFLDAGVIVDIEVGLGPAGEMRYPSYPQSHGWSFPGIGEFICYDKYLQADFKAAAAAVGHPEWEFPNDVGQYNDTPERTQFFRDNGTYLSEKGRFFLAWYSNNLIKHGDRILDEANKVFLGYKVQLAIKISGIHWWYKVPSHAAELTAGYYNLHDRDGYRTIARMLKRHRASINFTCAEMRDLEQSSQAMSAPEELVQQVLSAGWREGLNVACENALPRYDPTAYNTILRNARPHGINQSGPPEHKLFGFTYLRLSNQLVEGQNYVNFKTFVDRMHANLPRDPYVDPMAPLPRSGPEISIEMILQAAQPKLQPFPFQEHTDLPVGPTGGMGGQAEGPTCGMGGQVKGPTGGMGGQAEDPTSGIGGELPATM

SEQ ID NO: 1651 - protein, 336 aa, Acer pseudoplatanus
IQRPLKTIAKISGDVCVPRGVAVPALDKDILWEFQPKKIGEGDLLTGGDLYATAFENSLMQHHVALPPDGMGKVTYIAPPGQYSLKDTVLELEFQGVKKKITMLQTWPVRTPRPVASKLAADTPLLTGQRVLDALFPSVLGGTCAIPGAFGCGKTVISQALSKYSNSDTVVYVGCGERGNEMAEVLMDFPQLTMTLPDGREESVMKRTTLVANTSNMPVAAREASIYTGITIAEYFRDMGYNVSMMADSTSRWAEALREISGRLAEMPADSGYPAYLAARLASFYERAGKVKCLGGPERTGSVTIVGAVSPPGGDFSDPVTSATLSIVQVFWGLEL

SEQ ID NO: 1652 - protein, 479 aa, Sinorhizobium meliloti
MRRNRKVKILATLGPASADEQMIQKLHEAGADLFRINMSHASHEVMRTLIERIRVVEARCGRPIGILADLQGPKLRVGKFAEGKVELKIGQTFTLDNRDVPGDSRRVYLPHPEILEAVKPGHRLLIDDGKLHLRAEKTDGKSIVTTVVSGTRISDRKGVSLPDTLLGVGALTDKDRVDLDAVLATGEVDWVALSFIQRPEDLAEVRKIARGRVGLMSKIEKPQAIERIDEIIELSDALMVARGDLGVEMPLESVPGLQKQLTRACRRAGKPVVVATQMLESMISSPVPTRAEVSDVATAVFEGADAVMLSAESASGEYPVEAVSTMASIASNVERDPHYPGIIYAQRTPPEATGADAISLAAHQIAETLKLAAIVTYTSSGTTGLRAARERPQVPVIALSPIVQTARRLSVVWGLHCVVTEDATDLDDMVNRACRIVSTEGFGKPGDRIIVTAGVPLGTPGATNMLRIAYIGSDGQSGI

SEQ ID NO: 1653 - protein, 589 aa, Rhodobacter sphaeroides
MWCCSSAAAPSATRWGSRPGRPRTAWRWKRWCWRATRAATSMWRARRSSAPRPNGASRWRPPSIPGATSPSTTPPPTRRTSCRPPRSRCKETGHAHHPRLLLVPARPDRRADLGAGGLLPRPRLGREPRTYRRPASPEHLLGNVGHADVRPARPQGRDDRAGRVPQGLARPLHPHQCLRFHPRLRDGHDELHRQPPRGRAQPPHGAHRGRRPVDPLHAQHRPLSRSSHGSADGPRPGGFAPPGPPAGYLTQSERGDCDEWRGLTGAAPGYSLNRQLSEFAMTDAATAPTSIDLRAEYEGSGAKEVLEELDRELIGLKPVKDRIRETAALLLVERARQKLGLAHETPTLHMSFTGNPGTGKTTVALKMAGLLHRLGYVRKGHLVSVTRDDLVGQYIGHTAPKTKEVLKRAMGGVLFIDEAYYLYRPDNERDYGQEAIEILLQVMENNRDDLVVILAGYADRMENFFQSNPGFRSRIAHHIEFPDYSDEELFEIAGHMLDDQNYQMTPEAETALRAYIGLRRNQPHFANARSIRNALDRARLRQANRLFTASSGPLDARALSTIAEEDIRASRVFKGGLDSERRAAEALAR

SEQ ID NO: 1654 - protein, 225 aa, Salmonella enterica subsp. enterica serovar Typhi
MPEEAHVQCKGFLFDLDGTLVDSLPAVERAWCSWADRFNLAHDEVLGFIHGKQAITSLRHFMAGKSEAEIAAEFTRLEQIEATETAGITALPGAVDLLNHLNKAGIPWAIVTSGSMPVARARHQVAGLPAPEVFVTAERVKRGKPEPDAYLLGAQLLGLAPQECVVVEDAPAGVLSGLAAGCHVIAVNAPADTPRLADVDFALDSLTQLSVAKQPNGDVVVLRKT

SEQ ID NO: 1655 - protein, 154 aa, Oryza sativa
  unsure (1)..(154): unsure at all Xaa locations
XAVSPPGGDFSDPVTSATLSIVQVFWGLDKKLAQRKHFPSVNWLISYSKYSKALEPHYEREDPDFIDIRTKAREVLQREDDLNEIVQAVERAAGADGQKITYSVIKHRMGDLFYRLVSQKFEDPAEGKEVLIAKFQKLYDDLTAGFRNLEDEAX

SEQ ID NO: 1656 - protein, 478 aa, Buglossoides arvensis
  unsure (1)..(478): unsure at all Xaa locations
XLEKNNLGRVVQIIGPVLDVAFXPGKMPNIYNALVVXGRDXVGQPINVXCEVQQLLGNNRVXAXAMSATXGLTXGMEVIDTGAXXSVPVGGATLGRIFNVLGXPVDNLGPVDTRTTSPIHRSAPAFIQLDTKLSIFETGIKVVDLLAPYRRGGKIGLFGGAGVGKTVLIMELINNIAKAHGGVSVFGGVGERTREGNDLYMEMKESGVINEENIAESKVALVYGQMNEPPGARMRVGLTALTMAEYFRDVNEQDVLLFIDNIFRFVQAGSEVSALLGRMPSAVGYQPTLSTEMGTLQERITSTKAGSITSIQAVYVPADDLTDPAPATTFAHLDATTVLSRGLAAKGIYPAVDPLDSTSTMLQPRIVGEEHYEIAQRVKETLQRYKELQDIIAILGLDELSEEDRLTVARARKIERFLSQPFFVAEVFTGSPGKYVGLAETIRGFQLILSGELDGLPEQAFYLVGNIDEATAKAMNLE

SEQ ID NO: 1657 - protein, 217 aa, Glycine max
MGLNVPQRQLTLLLLIALAAAEKTLHGCRSTCGSVSSIPYPFGIGNSSVTGENCFLEKALMLTCINSTLYHGNGNVQILDITLDSKMVVLAFISKVCKNESVGRVVTKGHEAGLRTPAFTVSSEDNKFVTVGCDTYGYLNSFNNDIRSQMGCFTRCDTIESVQSMQEDGKCTGIGCCQMDIPPGMKNISIQAFSYYNFNYSSDFNKAAILLWQKTAT

SEQ ID NO: 1658 - protein, 1011 aa, Cocos nucifera
MSQASVDMEDVKPSISLPSDDGGAMEARLTDVCKSKLALDESTMRQAMILFRESKHILLANMSAIGSGSPEEIERFWSAFVLYCVTRLSKGRTKQEKEENGITLCRILRVLKMNVVDFFKEIPQFCLKAGYILTGLYGSDWEKRLELKELQANIVHLSLLSRYYKRAYQELFLPNDASSGRHSVAPNSVGYVSDYHHFGWLLFLALRIHAFSRFKDLVTCTNGLVSILAILILHIPARFRNFHIQDSLLFAKRTAKGVDLVASLCDKYHTSEDELRRVMEKANNLIVDILKKKPCAASECKRENLAYINTDGLIYFEDLLEENSLQSSILILEDNYDDAINSKGELDERMFVNDEDSLLGSGSLSGGSIKMKRKYDAMASPAKSITSPLSPPLSPASPVNGNPVIKMVPITPVSTAMTTAKWLRNIISPLPSRPSTELLCFFSSCDRDITTDVTRRASIILGAIFPTTSFGDCCISGNLQSVNQMDSIWAEQRKVEAMKLYYRVLETMCRAESHILNGNNLTSLLSNDRFHRCMLACSAELVLATHKTVTMMFPAVLEKTGITAFDLSKVIESFVRHEETLPRELKRHLNSLEERLLESMAWERGSSMYNSLIVARPTLAAEINRLGLLAEPMPSLDAIAVHNNISTGGLPPLPFQKHEHSSDQNGGAVSPKRACSEYRSVLVERNSFTSPVKELTLTLNLKSKLPPLQSAFASPTRPNPAGGGETCAETGINIFFNKIVKLAAIRIRSLCERLQLPQQILEWVYCLIQQILSQRTALFFNRHIDQIILCSFYGVAKISQMALTFKEIIYNYRKQPQCKPQVFRSVFVHWPSTSHNGKTGQEHVDIITFYNEVFIPSVKPLLVELGPAGVAQKSKSSPEDSNNADSQIPGSPRLSPFPNLPDMSPKKVSAAHNVYVSPLRSSKMDALLSPSSKSYYACVGESTHAYQSPSKDLTAINNRLNSGRKVSGRLNFDVVSDSVVAGSLGAQNGSSAPAPACSILELPVKREQPDS

SEQ ID NO: 1659 - protein, 474 aa, Nuphar variegata
GRIAQIIGPVLDVAFPPGKMPNIYNSLVVKGRDTAGQEINVTCEVQQLLGNNRVRAVAMSATDGLMRGMEVIDTGAPLSVPVGGATLGRIFNVLGEPVDNLGPVDTRTTSPIHRSAPAFIQLDTKLSIFETGIKVVDLLAPYRRGGKIGLFGGAGVGKTVLIMELINNIAKAHGGVSVFGGVGERTREGNDLYMEMKESGVINEENIAESKVALVYGQMNEPPGARMRVGLTALTMAEYFRDVNEQDVLLFIDNIFRFVQAGSEVSALLGRMPSAVGYQPTLSTEMGSLQERITSTKEGSITSIQAVYVPADDLTDPAPATTFAHLDATTVLSRGLAAKGIYPAVDPLDSTSTMLQPRIVGEEHYETAQRVKQTLQRYKELQDIIAILGLDELSEEDRLTVARARKIERFLSQPFFVAEVFTGSPGKYVGLAETIRGFQLILSGELDSFPEQAFYLVGNIDEATAKAMNLEVES

SEQ ID NO: 1660 - protein, 501 aa, Arabidopsis thaliana
MAALLLLFLFLFASSALSQDSLIGVNIGTEVTNMPSPTQVVALLKSQNINRVRLYDADRSMLLAFAHTGVQVIISVPNDQLLGISQSNATAANWVTRNVAAYYPATNITTIAVGSEVLTSLTNAASVLVSALKYIQAALVTANLDRQIKVSTPHSSTIILDSFPPSQAFFNKTWDPVIVPLLKFLQSTGSPLLLNVYPYFDYVQSNGVIPLDYALFQPLQANKEAVDANTLLHYTNVFDAIVDAAYFAMSYLNFTNIPIVVTESGWPSKGGPSEHDATVENANTYNSNLIQHVINKTGTPKHPGTAVTTYIYELYNEDTRPGPVSEKNWGLFYTNGTPVYTLRLAGAGAILANDTTNQTFCIAKEKVDRKMLQAALDWACGPGKVDCSALMQGESCYEPDDVVAHSTYAFNAYYQKMGKASGSCDFKGVATVTTTDPSRGTCVFPGSAKSNQTLGNNTSALAPSANSTTSGCIPKYYHHPHASFGDLTLLSLLLIIALVFL

SEQ ID NO: 1661 - protein, 461 aa, Thermoanaerobacter tengcongensis
MRNVKNYTPKEIVAELDKYIVGQKEAKKSVAVALRNRYRRSLLPEDFKEEVTPKNILMVGPTGVGKTEIARRIAKLVEAPFVKVEATKFTEVGYVGRDVDSMVRDLVEAAVRMVKEEKLKAVTEKAKKLAEERLIDYLLGKKKKQPKNPFEMIFNYPSSERTEEPDNVDSYKREEIRQRLRSGELDNHMVEIEVTDTTPPMLEMYTNLGAEELNITLQDMFSDLLPKKKKLRKVTVAEAKKILEAEEAQNLIDMDEVIEEAVKRAENDGIIFIDEIDKIASTGYSAGPDVSREGVQRDLLPIIEGCTVMTKYGPVKTDYILFIAAGAFNVAKVSDLIPELQGRFPIRVNLKPLTKEDFVRILKEPKNALTKQYQELLRTEGVEIKYTEEAIETIAEVAYLINQQSEDIGARRLHTVMEKLFEDLSFHAPELSGQEIVITADYVKEQLKDSLNKYEVNKYIL

SEQ ID NO: 1662 - protein, 92 aa, Magnetospirillum magnetotacticum
MPPGARTMTARIDAAFARCRAEGRAALVTYVMAGDPDPETSLKVLEALPKAGADIVEFGLPFTDPMADGPAIQAAGLRALKVGQDLSGTLGL

SEQ ID NO: 1663 - protein, 584 aa, Clostridium tetani E88
MQKTKMVFTIGPASDSEEVLSELIKAGMSASRHNFSHGTHEEHKIRIDLIRKLSDKFNKNIAVILDTKGPEIRTGDFKDKTVQLKEGNKFTIYCGEEILGDETKCSITYNDLHNDVKTGDSILIDDGLVGLEVEEVEGSKVHCVVKNSGAVSNHKGVNVPGVDVSLPSLTEKDKSDLEFGCKVGVDFIAASFIRKGSDVLEIRKVLEENGGTDIQIFSKIENQQGVENIDEIIKFSDGIMVARGDMGVELQMEQVPIIQKMIIEKCNKAGKPVITATQMLDSMIRNPRPTRAEVSDVANAIFDGTDAVMLSGETAGGKYPIEAAKAMAKIARTAEETMDYDEIFNRKREARVLSVANAISIATCTTASELNASAILTATQTGYTARAVSKYRPACPIIAITPSKNVARKLALSWGVFPILTTKFTSTDALIENSVDIALTAEYIRKGDLVVIAAGIPVSYSGTTNMLKVHVVGDILVQGRGAGNSAGYGIAKVVNSTEEAERVIESGDILVVKDADIDYVSILNRVSGVITERGGLTSHLAIECITNEIPFICGAGGATDVLKSGYFITMDVKRGIVYNGRITI

SEQ ID NO: 1664 - protein, 176 aa, Triticum aestivum
RMLTRHHASMNFTCAEMRDSEQSEEAKSAPEELVQQVLSAGWREGLHVACENALGRFDATAYNTILRNARPKGINKNGPPEHKLFGFTYLRLSNELLEGQNYATFQTFVEKMHANLGHDPSVDPVAPLERSKPEMPIEMILKAAQPKLEPFPFDKNTDLPVKDHTDVGDEVLLAPV

SEQ ID NO: 1665 - protein, 269 aa, Geobacter metallireducens
MSRITGTFAELKRTGKKALVTFITAGDPDLATTEELIPLLAENGADIIELGVPFSDPMADGPTIQLSSERALAAGTTLSRILATVKSVRGRTQVPIVLMGYFNPIFSYGLERFAADAAAAGVDGVLLVDLPPEEAGEFKACADRHGIDVIFLLTPTSDETRIRTVTNRARGFIYYVSVTGVTGVRSGIEASVAGNVNIIKECSKVPVAVGFGIATPEQAGEVAATADGVVVGSAIVKLFEKHRGEELKGALATFVSSLKQAVDRGRYDN

SEQ ID NO: 1666 - protein, 248 aa, Pyrococcus furiosus DSM 3638
MFKDGSLIPYLTAGDPDKQSTLNFLLALDEYAGAIELGIPFSDPIADGKTIQESHYRALKNGFKLREAFWIVKEFRRHSSTPIVLMTYYNPIYRAGVRNFLAEAKASGVDGILVVDLPVFHAKEFTEIAREEGIKTVFLAAPNTPDERLKVIDDMTTGFVYLVSLYGTTGAREEIPKTAYDLLRRAKRICRNKVAVGFGVSKREHVVSLLKEGANGVVVGSALVKIIGEKGREATEFLKKKVEELLGI

SEQ ID NO: 1667 - protein, 426 aa, Nitrosomonas europaea ATCC 19718
MSEKTNDEKLLYCSFCGKSQREVRKLIAGPSVFICDECIDLCNDIIREEIQVDETAKLAKTSLPTPHEIRETLDQYVIGQESAKKILSVAVYNHYKRLKNLSKVNNGDDVELSKSNILLIGPTGSGKTLLAQTLARLLDVPFVIADATTLTEAGYVGEDVENIIQKLLQKCNHDVEKAQRGIVYIDEIDKISRKSDNPSITRDVSGEGVQQALLKLIEGTTALVPPQGGRKHPNQEFIQIDTTNILFICGGAFDGIDKIIRGRSEKSGIGFGADVINQNDRKELNKILKDIEPEDLIKYGLIPEFVGRLPVVATLSELNEAALIQILVEPKNALIKQYNKLFSMEGGVELEFREQALVAIARKALSRKTGARGLRSILEETLLDIMYDLPSIENVSKVVIESGSNHDELQPIVIYAEKPKLARSSK

SEQ ID NO: 1668 - protein, 498 aa, Calystegia sepium
MAPIPGVMPMGNYVPVYVMLPLGVVNSDNVFPDQDKVENELKQLKEAGCDGIMVDVWWGIIEAKGPKNYDWSAYKELFQLVRKCGLKIQAIMSFHQCGGNVGDAVFIPIPKWILQIGNNNPDIFYTNKAGNRNQEYLSLGVDNQSLFDGRTALEMYRDFMESFRDNMTNFLRAGDIVDIEVGCGAAGELRYPSYPETQGWVYPGIGEFQCYDKYMVADWKEANKQAGHANWEMPKNAGTYNDTPEKTEFFRLNGTYDSEFGKFFLTWYSNKLIIHGDQILEQANKVFVGFRANIAAKVSGIHWWYNDVSHAAELTAGFYNISGRDGYRPIARMLARHHTTLNFTCLEMRDSEQPAEAKSAPQELVQQVLSSGWKEFIDVAGENALPRFDATAYDQMLLNVRPNGVNLNGPPKLKMSGLTYLRLSDDLLLKDNFELFKKFVKKMHADLDASPNAISPPVLERSNSAIAIDELLEATKVSRAFPWYDVTDMPVDGSNPFD

SEQ ID NO: 1669 - protein, 266 aa, Cyanidium caldarium
MKNSIKNIFESERGLLLLPFVSLGTPNTQINKQAIIAMDKNGANIIELGIPYSDPVADGPVIQDAYNKAIKNGVNIRKAFKILMNLKGKIKSPIIVFIYYNQLLNYGINKFLEKLIQLEVQGIIVPDLPYDESQILKKKCTINNIALISLIALTSSFSRIKKIARNAEGFLYLISKTGVTGGTGKLMNKLKIIIKTIQKLTSKPVVVGFGINSRRQIKQLIEWNSNGIVIGSPCVQILLQSSKEVCVIKLSGLIKQIKESTSSTSN

SEQ ID NO: 1670 - protein, 490 aa, Cinchona pubescens
GSGVSTFEKKNSGRIVQIIGPVLDVAFPPGKMPNIYNALVVKGRDTVGQPINVTCEVQQLLGNNRVRAVAMSATDGLTRGMEVIDTGAPLSVPVGGATLGRIFNVLGEPVDNLGPVDTRTTSPIHRSAPAFIQLDTKLSIFETGIKVVDLLAPYRRGGKIGLFGGAGVGKTVLIMELINNIAKAHGGVSVFGGVGERTREGNDLYMEMKESGVINEENIAESKVALVYGQMNEPPGARMRVGLTALTMAEYFRDVNEQDVLLFIDNIFRFVQAGSEVSALLGRMPSAVGYQPTLSTEMGSLQERITSTKEGSITSIQAVYVPADDLTDPAPATTFAHLDATTVLSRGLAAKGIYPAVDPLDSTSTMLQPRIVGEEHYETAQRVKQTLQRYKELQDIIAILGLDELSEEDRLTVARARKIERFLSQPFFVAEVFTGSPGKYVGLAETIRGFQLILSGELDGLPEQAFYLVGNIDEATAKAMNLEMENNLKK

SEQ ID NO: 1671 - protein, 350 aa, Schizosaccharomyces pombe
MSYEKHSDAKASRYAWNQPWNPFEVTLSDPTYPMNLEEKNQIPYRFQSVPDDVPEVPHIESRYKNLPGNNIYLCCGRLQMSSQYKAFLISLFALILPGVLFFIFSAFWLWHHVSPAVPITFAYLYALAVVSMFKCSTADPGILPRNAYSLTYNPAHPWSVIPEDRKVLVGSTRSDSVFVNTVYCHTCHLYRPPRASHCHLCDNCVEYLDHHCIWLNTCIGRRNYRYYFIFLLSVVLSALYLTGLGFYTSIGSFHESTDTNFAAHLRRPWAGVSFFLGIYGALGAILPGILFCYQCYLISVGQNVHEYLRAKSTETEDVHPFHDSIWLNFLVVLCRPKNVSYVRPTRKSYV

SEQ ID NO: 1672 - protein, 310 aa, Arabidopsis thaliana
RKLKRKKIFLYKCIYPSLHQHNLTFHFLQLLQISYFPENHFPKKNKTFPFVLLPPTAITAYQSELGGDSSPLRKSGRGKIEIKRIENTTNRQVTFCKRRNGLLKKAYELSVLCDAEVALIVFSSRGRLYEYSNNSVKGTIERYKKAISDNSNTGSVAEINAQYYQQESAKLRQQIISIQNSNRQLMGETIGSMSPKELRNLEGRLERSITRIRSKKNELLFSEIDYMQKREVDLHNDNQILRAKIAENERNNPSISLMPGGSNYEQLMPPPQTQSQPFDSRNYFQVAALQPNNHHYSSAGRQDQTALQLV

SEQ ID NO: 1673 - protein, 605 aa, Treponema pallidum
MIKDDVVTGRVVRVSGPIVYAEGLSACSVYDVVDVGEASLIGEIIRLDESKAVVQVYEDDTGMRVGEKVTSLRRPLSVRLGPGLIGTIYDGIQRPLERLFQEDGAFLRPGARSQPLDGSVRWDFRPHCNERGEALCAGIPIAPGSVLGTVQETPSVVHTIMVPPDIRGSVLSSFKGAGAYTIDEEIGRTDLGEPLFLSQYWPVRRARPFSKKLAVCEPLVTGQRAIDVFFPLSKGGTAAIPGGFGTGKTMTQHAVAKWCDADIIVYIGCGERGNEMTDVLSEFPKLIDPRTGRSLMERTILIANTSNMPVSAREVSLYSGITLAEYYRDMGMHVAIMADSTSRWAEALRELSGRMEEMPAEEGFPAYLPTRLAEFYERAGRVETCVAREGSVSIIGAVSPLGGDFSEPVTQHTKRFIRCFWALDRELAHARHYPAIGWIDSYSEYAQEVSAWWSKYDPRAGALRAAALDLLRKEQRLQQIVRLVGPDALPGEDRLVLMVCEMIKGGFLQQNAFDPTDVFSCPEKQVQILRTIVDFHERAVVLLRAGISLSALSQLSCRELIVRMKTTYGNEDVHKMQKVYDTMCTEFDQLSVCAAARTQGGEKVE

SEQ ID NO: 1674 - protein, 406 aa, Populus nigra
MGFLCFSGKSSKRSENSSIDENNSNIKRKDQTQLTSGSMKVKPYVNDSREEGASKDDQLSLDVKSLNLKDEISKDIRNNGNPAQTFTFEELVAATDNFRSDCFLGEGGFGKVYKGYLEKINQVVAIKQLDQNGLQGIREFVVEVLTLSLADNPNLVKLIGFCAEGDQRLLVYEYMPLGSLENHLHDIPPNRQPLDWNARMKIAAGAAKGLEYLHNEMAPPVIYRDLKCSNILLGEGYHPKLSDFGLAKVGPSGDHTHVSTRVMGTYGYCAPDYAMTGQLTFKSDVYSFGVVLLELITGRKAIDQTKERSEQNLVAWARPMFKDRRNFSGMVDPFLQGQYPIKGLYQALAIAAMCVQEQPNMRPAVSDVVLALNYLASHKYDPQIHPFKDPRRRPSHPGLDKDNGRT

SEQ ID NO: 1675 - protein, 271 aa, Thermus thermophilus
MTTLEAFAKARSEGRAALIPYLTAGFPSREGFLQAVEEVLPYADLLEIGLPYSDPLGDGPVIQRASELALRKGMSVQGALELVREVRALTEKPLFLMTYLNPVLAWGPERFFGLFKQAGATGVILPDLPPDEDPGLVRLAQEIGLETVFLLAPTSTDARIATVVRHATGFSYAVSVTGVTGMRERLPEEVKDLVRRIKARTALPVAVGFGVSGKATAAQAAVADGVVVGSALVRALEEGRSLAPLLQEIRQGLQRLEANPGLKESSKKPLS

SEQ ID NO: 1676 - protein, 252 aa, Arabidopsis thaliana
MAYQSELGGDSSPLRKSGRGKIEIKRIENTTNRQVTFCKRRNGLLKKAYELSVLCDAEVALIVFSSRGRLYEYSNNSVKGTIERYKKAISDNSNTGSVAEINAQYYQQESAKLRQQIISIQNSNRQLMGETIGSMSPKELRNLEGRLERSITRIRSKKNELLFSEIDYMQKREVDLHNDNQILRAKIAENERNNPSISLMPGGSNYEQLMPPPQTQSQPFDSRNYFQVAALQPNNHHYSSAGRQDQTALQLV

SEQ ID NO: 1677 - protein, 591 aa, Chlamydophila caviae GPIC
MVATSGQTTQGYVVEAYGNLLRVRFDGHVRQGEVAYVNVNDTWLKAEVIEVVGQEVKIQVFEDTQDVCRGALVTFSGHLLEAELGPGLLQGIFDGLQNRLQVLAESSFFLKRGEYVNALCKNTLWEYTPKAVVGDVLVRGDALGFVKEGYFNHKIMVPFSCFKEVTITWVISEGSYSVDTVVAKARDAEGKEYSFTMVQKWPIKQAFIQGDKVPCHEIMDVGIRILDTQIPVLKGGTFCTPGPFGAGKTVLQHHLSKYAAVDIVILCACGERAGEVVEVLQEFPHLTDPHTGESLMHRTCIICNTSSMPVAARESSIYLGITVAEYYRQMGLHVLLLADSTSRWAQALREISGRLEEIPGEEAFPAYLASRIAAFYERGGAVRMKDGSEGSLTICGAVSPAGGNFEEPVTQATLSVVGAFCGLSKARADARRYPSIDPMISWSKYLDQVGDILENKIQGWGKAVKKANYFLREGSEIGKRMEVVGEEGIPMEDMEIYLKAELYDFCYLQQNAFDAVDCYCPFDRQIELFSLMSRIFDAKFSFDCPDNARSFFLELQSKIKTLNGQKFLSEEYKEGMEVVLRLLETKMVQTA

SEQ ID NO: 1678 - protein, 121 aa, Glycine max
LCLGGGTYLCYTISYSQEKRLRMNMGLKKLQERVKKQQEEVGKKIQTVGKIAGMHPNEWVENADRLVAGFLEMFEEGCHKMGTAFRDRIQERLRAQQLKSLLYDEWDDDNEFYDDDEYYTD

SEQ ID NO: 1679 - protein, 217 aa, Enterococcus faecium
MKYNAVIFDMDGLLFDTELVYYEATQVVADKMGFPYDKDLYLKFLGVSDEEVWANYHMIFSEFGKTSVQRFIDDSYQETLERFSQGAVQMKPGVLELLSFLEEHQIPKVVASSNQRAVIELLLKKNNLFERFETIVSAENVQRAKPDPEIFLLANQKLGTAKKETLILEDSQNGILAASAAEIPVVMVPDLLPPSQELIKKTAGVVSSLHEIPALLK

SEQ ID NO: 1680 - protein, 465 aa, Lunasia amara
GHVAQIIGPVLDVAFPPGKMPNIYNALVVKGRDTVGQPINVTCEVQQLLGNNRVRAVAMSATDGLTRGMEVIDTGAPLSVPVGGATLGRIFNVLGEPVDNLGPVDTRTTSPIHKSAPAFIQLDTRLSIFETGIKVVDLLAPYRRGGKIGLFGGAGVGKTVLIMELINNIAKAHGGVSVFGGVGERTREGNDLYMEMKESGVINEQNIAESKVALVYGQMNEPPGARMRVGLTALTMAEYFRDVNEQDVLLFIDNIFRFVQAGSEVSALLGRMPSAVGYQPTLSTEMGSLQERITSTKEGSITSIQAVYVPADDLTDPAPATTFAHLDATTVLSRGLAAKGIYPAVDPLDSTSTMLQPRIVGEEHYETAQRVKQTLQRYKELQDIIAILGLDELSEEDRLTVARARKIERFLSQPFFVAEVFTGSPGKYVGLAETIRGFKLILSGELDGLPEQAFYLVGNIDEATA

SEQ ID NO: 1681 - protein, 402 aa, Coleochaete sp. 18b3
ILGDNKVRAVSMSPTDGLMRGMDVIDTGAPLSVPVGEATLGRIFNVLGEPVDELGPVDATTTFPIHRSAPAFTQLDTKLSIFETGIKVVDLLAPYRRGGKIGLFGGAGVGKTVLIMELINNIAKAHGGVSVFGGVGERTREGNDLYMEMKESKVINEENISESKVALVYGQMNEPPGARMRVGLTALTMAEYFRDVNKQDVLLFIDNIFRFVQAGSEVSALLGRMPSAVGYQPTLSTEMGTLQERITSTKEGSITSIQAVYVPADDLTDPAPATTFAHLDATTVLSRGLAAKGIYPAVDPLDSTSTMLQPWIVGKEHYETAQGVKQTLQRYKELQDIIAILGLDELSEEDRLTVARARKIERFLSQPFFVAEVFTGSPGKYVSLIETIKGFQLILSGDLDAL

SEQ ID NO: 1682 - protein, 483 aa, Barringtonia asiatica
  unsure (1)..(483): unsure at all Xaa locations
XLEKQNSGRIVQIIGPVLDVAFPPGKMPNIYNALVVKGRDTVGQPINVTCEVQQLLGNNRVRAVAMSATDGLMRGMEVIDTGAPLSVPVGGATLGRIFNVLGEPIDNLGPVDTRTTSPIHRSAPAFIQLDTKLAIFETGIKVVDLLAPYRRGGKIGLFGGAGVGKTVLIMELINNIAKAHGGVSVFGGVGERTREGNDLYMEMKESGVINEQNIAESKVALVYGQMNEPPGARMRVGLTALTMAEYFRDVNEQDVLLFIDNIFRFVQAGSEVSALLGRMPSAVGYQPTLSTEMGSLQERITSTKEGSITSIQAVYVPADDLTDPAPATTFAHLDATTVLSRGLAAKGIYPAVDPLDSTSTMLQPRIVGEEHYETAQRVKQTLQRYKELQDIIAILGLDELSEEDRLTVARARKIERFLSQPFFVAEVFTGSPGKYVGLAETIRGFQLILSGELDGLPEQAFYLVGNIDEATAKAMNLEMETTL

SEQ ID NO: 1683 - protein, 129 aa, Triticum aestivum
MDPAATQPPPPPPPPYLPPRLVIDGAGGGSGAAARACRHHAYSRKQKSLGLLCSNFVALYDRDDVETVGLDDAARRLGVERRRIYDIVNVLESVGILVRRAKNRYTWIGFEGVPAALKELKERTLREMS

SEQ ID NO: 1684 - protein, 698 aa, Mycoplasma pulmonis
MTTNKNSYKDYHFNTLKAASNKVGLKIKKGTKRNKLIENILKHDLEFPENTVLAFLLSPESSASLQKESASKAKIVKEVTKIAKEKASSKKVKVVKNLLEDEKPEPVVVQEETKEIESSFSDYDYKKMTAYKIYSPENLALLTYDQLVVLAKVHKIFKPENKTKQSLIAAIAERQYTDDFRRKSEEIMKPRAKFKARNPLKPLEDKAYVLEGIVVEVKSQVYKIKLTLVKEKPIINALFEIQTEQGQTRLLEISDILSDSLVAGYVLGREQGIEIGSFARSKNNPYSIPISEKLLGRIIDPVGRILDDPTHPLVGKQYAPMIETESKQTEKYKVFPKTQILETGIKVIDVLLPIPSGGKTGLLGGAGVGKTVVVQELINTFIKHHDGVSVFSGIGERIREGHELWEEAKELGFLDKTTFIFGQMNESPGLRLRSGFTGVKVAEYFRNNLGKNVLLFMDNIFRYMQAGSEVSSLLEKTPSAVGYQPMLVSEIGKLQERINSNNDGDITSIQAMYIPADDFTDPAAVAAFAHFDATIILSRQLAAEGLYPAVDPLVSSSKLLSTKFTSTRHINIAKETIAILEKSKSLEDIINILGFDALSEADRKTVRIARIIRKFLTQPFVVSEKFTGQKGVFVTLNDALRGMERILTGEFNHIPETYFAYVGTIEEALEKYEYDNKEEEAKLMVKEEISQEATNINI

SEQ ID NO: 1685 - protein, 569 aa, Magnetococcus sp. MC-1
MARRAKIVATLGPACSSVEQITRLIEAGLDVARLNMSHGDHKAHLELIHNVREASRIAKREVALLCDLQGPKIRVGHLDEPLRLEKGQQWAIIPEGSHPPKLKCDGIIPCTYAGLAKDAVPGCRILFDDGYLQARAIGTEEGALLVNIEHGGLLKSHKGINMPDASISAPSLTTKDQQDLFFGVKHDVDYVALSFVRSAKCVQNVKFMLHRRKIYKPIIAKIERPEAIRNIDEIIKVVDGIMIARGDMAVEIGNHRVPSVQRQIIQKCRAKGKPVITATQMLESMIQNPSPTRAEASDVANAIWDGTDAVMLSAETSVGVDPINTVLTMGRIVEEAERNPRGPRLDAESHSISSASMMAAARVAEQVSARWIIALTVTGSSALSLARFRPEVPVLGAARTQGGVRRMNLYWGITPRLFNYSIEEREDIEPEVIQWMREQSMLQVGEKIVVVKGGGLLSNHSTSSSIRVDLVRDTRNIDEGVSQITQESVAGKGIITLDAARCVACGNCVNICPYGIWVAAASNTRSVSFNRDQVDNCSLDQECVRVCSSHAITITDAKDMHEWVEKEEL

SEQ ID NO: 1686 - protein, 490 aa, Macadamia jansenii
GPGVSALEEKNLGRIAQIIGPVLDVAFPPGKMPNIYNALIVKGRDTVGQQINVTCEVQQLLGNNRVRAVAMSATDGLMRGMEVIDTGAPLSVPVGGATLGRIFNVLGEPVDNLGPVDTRTTSPIHRSAPAFIQLDTKLSIFETGIKVVDLLAPYRRGGKIGLFGGAGVGKTVLIMELINNIAKAHGGVSVFGGVGERTREGNDLYMEMKESGVINEQNIAESKVALVYGQMNEPPGARMRVGLTALTMAEYFRDVNEQDVLLFIDNIFRFVQAGSEVSALLGRMPSAVGYQPTLSTEMGSLQERITSTKEGSITSIQAVYVPADDLTDPAPATTFAHLDATTVLSRGLAAKGIYPAVDPLDSTSTMLQPRIVGEEHYETAQRVKQTLQRYKELQDIIAILGLDELSEEDRLTVARARKIERFLSQPFFVAEVFTGSPGKYVGLAETIRGFQLILSGELDGLPEQAFYLVGNIDEATAKAMNLEVESNLKK

SEQ ID NO: 1687 - protein, 490 aa, Parnassia palustris
  unsure (1)..(490): unsure at all Xaa locations
XXXXXXXXXXXVSTLERKNLGRIAQIIGPVLDVAFSPGKMPNIYNALVVKGRDTAGQQINVVCEVQQLLGNNQVRAVAMSATDGLTRGMEVIDTGVPLNVPVGGATLGRIFNVLGEPVDNLGPVDTRTTSPIHRSAPAFIQLDTKLSIFETGIKVVDLLAPYRRGGKIGLFGGAGVGKTVLIMELINNIAKAHGGVSVFXGVGERTREGNDLYMEMKESGVINEQNIAESKVALVYGQMNEPPGARMRVGLTALTMAEYFRDVNEQDVLLFIDNIFRFVQAGSEVSALLGRMPSAVGYQPTLSTEMGSLQERITSTKKGSITSIQAVYVPADDLTDPAPATTFAHLDATTVLSRGLAAKGIYPAVDPLDSTSTMLQPRIVGEEHYETAQRVKQTLQRYKELQDIIAILGLDELSEEDRLTVARARKIERFLSQPFFVAEVFTGSPGKYVGLAETIRGFKLILSGELDGLPEQAFYLVGNIDEATVKATTL

SEQ ID NO: 1688 - protein, 160 aa, Stropharia aeruginosa
LEECLKIMNVLAEFEEYTVSNQSPYAQWTQQDVKRPPVAIVGAREYIFSENIGILGDLAAGKEQTFGTLSARSMAWIGGKLHYGHPDFLNALYMTTRGGVSKAQKGLHLNEDIYAGMNAFGRGSRIKHTEYYQCGKGRDLGFGTILNFQTKIGTGMGEQM

SEQ ID NO: 1689 - protein, 624 aa, Glycine max
  unsure (1)..(624): unsure at all Xaa locations
MPAVYGARLTTFEDSEKESEYGYVRKVSGPVVVADGMAGAAMYELVRVGHDNLIGEIIRLEGDSATIQVYEETAGLMVNDPVLRTHKPLSVELGPGILGNIFDGIQRPLKTIAKRSGDVYIPRGVSVPALDKDTLWEFQPKKIGEGDLLTGGDLYATVFENSLMQHHIALPPDNMGKITYIAPPGQYSLQDTVLELEFQGVKKKFTMLQTWPVRTPRPVASKLAADTPLLTGQRVLDALFPSVLGGTCAIPGAFGCGKTVISQALSKYSNSDAVVYVGCGERGNEMAEVLMDFPQLTMTLPDGREESVMKRTTLVANTSNMPVAAREASIYTGITLAEYFRDMGYNVSMMADSTSRWAEALREISGRLAEMPADSGYPAYLAARLASFYERAGKVKCLGGPERTGSVTIVGAVSPPGGDFSDPVTSATLSIVQVFWGLDKKLAQRKHFPSVNWLISYSKYSTALETFYEQFDPDFINIRTKAREVLQREDDLNEIVQLVGKDALAEGDKITLETAKLLREDYLAQNAFTPYDKFCPFYKSVWMMRNIIHFYNLANQAVERGAGSDGQKISYTLIKHRMGDLFYRLVSQKFEDPAEGEAALVAKFQKXLHEDLTNGFRNLEDETR

SEQ ID NO: 1690 - protein, 485 aa, Siphonodon celastrineus
  unsure (1)..(485): unsure at all Xaa locations
XXGXSXLXKKNLGRFXQIIGPVLDVAFPPGKMPNIYNALVVKGRDTXGHTINVICEVQQLLGNNPVRAVPMSATDGLMRGMDVIDTGAPLSVPVGGATLGRIFNVLGEPVDNLGPVDTRTTSPIHKSAPAFIQLETKFSIFETGIKVVDLLAPYRRGGKIGLFGGAGVGKTVLIMELINNIAKAHGGVSVFGGVGERTREGNDLYMEMKESGVINEQNIAESKVALVYGQMNEPPGARMRVGLTALTMAEYFRDVNEQDVLLFIDNIFRFVQAGSEVSALLGRMPSAVGYQPTLSTEMGSLQERITSTKKGSITSIQAVYVPADDLTDPAPATTFAHLDATTVLSRGLAAKGIYPAVDPLDSTSTMLQPRIVGEEHYETAQRVKQTLQRYKELQDIIAILGLDELSEEDRLTVARARKIERFLSQPFFVAEVFTGSPGKYVGLAETIRGFKLILSGELDGLPEQAFYLVGNIDEATTKATNLEME

SEQ ID NO: 1691 - protein, 45 aa, Glycine max
MASGATCVQRLDGSRDSAIHTKYRISLRSSSMQEPRYPLPRVIVP

SEQ ID NO: 1692 - protein, 424 aa, Escherichia coli O157:H7 EDL933
MTDKRKDGSGKLLYCSFCGKSQHEVRKLIAGPSVYICDECVDLCNDIIREEIKEVAPHRERSALPTPHEIRNHLDDYVIGQEQAKKVLAVAVYNHYKRLRNGDTSNGVELGKSNILLIGPTGSGKTLLAETLARLLDVPFTMADATTLTEAGYVGEDVENIIQKLLQKCDYDVQKAQRGIVYIDEIDKISRKSDNPSITRDVSGEGVQQALLKLIEGTVAAVPPQGGRKHPQQEFLQVDTSKILFICGGAFAGLDKVISHRVETGSGIGFGATVKAKSDKASEGELLAQVEPEDLIKFGLIPEFIGRLPVVATLNELSEEALIQILKEPKNALTKQYQALFNLEGVDLEFRDEALDAIAKKAMARKTGARGLRSIVEAALLDTMYDLPSMEDVEKVVIDESVIDGQSKPLLIYGKPEAQQASGE

SEQ ID NO: 1693 - protein, 438 aa, Sulfolobus tokodaii
MFRKTKIIATLGPSSENHIDELVKYVDVIRLNFAHGDKEQHEKYFNLVKNRVPILVDLPGPKLRIGDLGKNMILLKPGDTIEFGTQIPVDDILFFKLIRKGSEVLISDGRIRVKIIEAGNNYAKGLVEEGGILTSRKGINIPDSEIPVGLTDRDLELLKYALEMGATFIGLSFVTSPEEIRKAKEIVKDQAWIIAKIEKKSALKKLKEIIREADGVMVARGDLGVEVGLANLPQTQRRIVRLTRLYGKPVILATQVLESMVTSPIPTRAEVIDVANSIIQGVDAIMLSDETAMGQYPIDAVRTLHELILSVERSFKPRPPPPLKNIDDAIAYSAVSASNLASSSGIVVYTRTGASALRISRLRPVVPIIVLTQNQRVYERLKLCYGIYSFISEELNSLDNIVEKSKNIARQVGLKNTIIIIAGGIEEGSTRFLKVEEI

SEQ ID NO: 1694 - protein, 501 aa, Kluyveromyces lactis
MESRLGWLTDLSTETGTNLRRTSIICTIGPKTNNPETLVELRKAGMNIVRMNFSHGSYEYHQSVIDNARKSEELYQGRPLAIALDTKGPEIRTGTTTNDVDYPIPPNHEMIFTTDDKYAKACDDKTMYVDYKNITKVIEAGRIIYVDDGVLSFEVLEVIDDNTLKVKSLNAGKICSHKGVNLPGTDVDLPALSEKDKSDLKFGVKNGVHMVFASFIRTAQDVLTIREVLGEQGKDIKIIVKIENQQGVNNFDDILKVTDGVMVARGDLGIEIPAPQVFAVQKKLIAKCNLAGKPVICATQMLESMTYNPRPTRAEVSDVGNAVLDGADCVMLSGETAKGNYPINAVKTMAETALIAEQAIPYIPTYDDLRNLTPKPTSTTETIAAASVSAVFEQKARALIVLSTTGDTPRLVAKYKPNVPIVMVTRNPRAARFSHLYRGVFPFVYDESSDSEWTVDVEKRINFGVKKAKEFGILVDGDTIVTIQGFAAGVGNSNTLRVLTV

SEQ ID NO: 1695 - protein, 478 aa, Wilsonia backhousei
SAVEKKTLGRIVQIIGPVLDVAFPPGQMPNIYNALVVQGRDNEQTNVTCEVQQLVGNNRVRAVAMSDTAGLMRGMEVIDTGAPISVPVGGATLGRIFNVLGEPVDNLGPVDTKTTSPIHRSAPAFVQLDTKLSIFETGIKVVDLLAPYRRGGKIGLFGGAGVGKTVLIMELINNIAKAHGGVSVFGGVGERTREGNDLYMEMKESGVINEEDIAESKVALVYGQMNEPPGARMRVGLTALTMAEYFRDVNEQDVLLFIDNIFRFVQAGSEVSALLGRMPSAVGYQPTLSTEMGSLQERITSTKEGSITSIQAVYVPADDLTDPAPATTFAHLDATTVLSRGLAAKGIYPAVDPLDSTSTMLQPRIVGEEHYETAQRVKQTLQRYKELQDIIAILGLDELSEEDRLTVARARKIERFLSQPFFVAEIFTGSPGKYVGLAETIRGFQLILSGELDGLPEQAFYLVGNIDEATAKAMNLKT

SEQ ID NO: 1696 - protein, 477 aa, Stigmatella aurantiaca
MRRAKIVCTLGPASQSQDMLEALIEAGMDVARLNFSHGSHEQHAENIAKLRAASLKLRKAVGILGDLQGPKIRTGRFITGSTVLKEGAIFSITTDESVKGNDDIVSTTYAHLAADVNPGDRILLDDGLLELKVLETDKKQLLRTQVVIGGTLKNNKGINLPGVAVRADALTPKDREDLVFGIKEGVDFLALSFVRQPADIELARQAMAEAGRQVPIVAKLEKPEAIARLDAILDKTDGVMVARGDLGVEIPPEEVPAVQKDIIRRSNQRGLPVIVATQMLNSMIENPRPTRAEASDVANAVFDGADAVMLSGETASGRYPIESVQMMDRIVLAAESAGRAQSSLGRIPDGPIGVPSHFPDVIARVACQAAQASGASLIAAFTLSGVTARLLAHYRPAVPIVAFSPNQEVRRRLALLWGVVPRVLEPIQETEAMVKRVEEELLARGLARKGERIVIVFGAPVGQPGKINSLRLHTIQG

SEQ ID NO: 1697 - protein, 218 aa, Listeria innocua
MLKAVVMDFDGIVIDTEVVWYEIFKDWFKTKQHYDLSIEEFLQCVGSNVDDLFRELNETQQMDINRQAFEAETQATFIENSKSLPAKEGVESFIRELKERGLKLALATSSQRPKPLYHLERLGLLEYFDAIITAEDVTRIKPEPDLFLEALRALNVKPSEALIVEDSRNGLLAGNSAGVNVLVIPNEVTKHSDLTPNYMERESLADVDLTEIIAKYNK

SEQ ID NO: 1698 - protein, 762 aa, Medicago truncatula
MWKLKIGEGKNEPYLFSTNNFVGRQTWEYDPEAGSEEERAQVEEARKNFYDNRFKVKPCGDLLWRFQVLRENNFMQTIDGVKIEDGEEITYEKATTTLRRGTHHLAALQTSDGHWPAQIAGPLFFMPPLVFCVYITGHLDSVFPREHRKEILRYIYCHQNEDGGWGLHIEGHSTMFCTALNYICMRILGEGPDGGQDNACARARNWIRAHGGVTYIPSWGKTWLSILGLFDWLGSNPMPPEFWILPSFLPMHPAKMWCYCRLVYMPMSYLYGKRFVGPITPLILQLREELHTQPYEKINWTKSRHLCAKEDIYYPHPLIQDLIWDSLYIFTEPLLTRWPFNKLVRKRALEVTMKHIHYEDENSRYLTIGCVEKVLCMLACWVEDPNGDAYKKHLARVQDYLWMSEDGMTMQSFGSQEWDAGFAVQALLAANLNDEIEPALAKGHDFIKKSQVTENPSGDFKSMHRHISKGSWTFSDQDHGWQVSDCTAEGLKCCLLLSMLPPEIVGEKMEPERLYDSVNVLLSLQSKKGGLAAWEPAGAQEWLELLNPTEFFADIVVEHEYVECTGSAIQALVLFKKLYPGHRKKEIENFISEAVRFIEDIQTADGSWYGNWGVCFTYGSWVALGGLAAAGKTYTNCAAIRKAVKFLLTTQREDGGWGESYLSSPKKIYVPLEGSRSNVVHTAWALMGLIHAGQAERDPTPLHRAAKLLINSQLEEGDWPQQEITGVFMKNCMLHYPMYRDIYPLWALAEYRRRVPLPSTAV

SEQ ID NO: 1699 - protein, 487 aa, Ardisiandra wettsteinii
  unsure (1)..(487): unsure at all Xaa locations
MRINPTTSGPGVSVLEKKNLGRIIQIIGPVLDVSFPPGKMPNIYNALVVKGRDTAGQPINVTCEVQQLLGNNRVRAVAMSATDGLTRGMEVIDTGAALSVPVGGATLGRIFNVLGEPVDNLGPVDTRTTSPIHRSAPAFIQLDTKLSIFETGIKVVDLLAPYRRGGKIGLFGGAGVGKTVLIMELINNIAKAHGGVSVFGGVGERTREGNDLHMEMKESGVINEENIAESKVALVYGQMNEPPGARMRVGLTALTMAEYFRDVNEQDVLLFIDNIFRFVQAGSEVSALLGRMPSAVGYQPTLSTEMGSLQERITSTKEGSITSIQAVYVPADDLTDPAPATTFAHLDATTVLSRGLAAKGIYPAVDPLDSTSTMLQPRIVGEEHYEIAQRVKQTLQRYKELQDIIAILGLDELSEEDRLTVARARKIERFLSQPFFVAEVFTGSPGKYVGLAETIRGFQLILSGXLDGLPEQAFYLVGNIDEATAKA

SEQ ID NO: 1700 - protein, 479 aa, Haemophilus somnus 129PT
MSRRLRRTKIVCTLGPSTDRGNNLEKIIVAGANVVRMNFSHGTPEDHLARAEKVREIAKKLGKTVAILGDLQGPKIRVSTFKEGKIFLNIGDNFTLDADLPKGEGNQEAVGLDYKTLPQDVVPGDILLLDDGRVQLKVLSTDNTKVFTEVIVGGPLSNNKGINKLGGGLSANALTEKDKEDIILAARIGVDYLAVSFPRSSADLNYARELAQQAGLKAKIVAKVERAETVIDEEAMDDIILASDVIMVARGDLGVEIGDPELVGIQKKLIRRSRQLNRVVITATQMMESMISNPMPTRAEVMDVANAVLDGTDAVMLSAETAAGQYPSETVSAMAKVCLGAEKMPSVNISRHRLDKEFDTIEETIAMSTMFAANHMKGVAAIIAMTSSGHTAKLMSRISSGLPIFALSRNESTLNLCALYRGVIPIHFDQDSRTLEGLKAAIQSLKDKGYLVSGDLVLLTQGDHLTSNGTSTCRALVVE

SEQ ID NO: 1701 - protein, 470 aa, Selenomonas ruminantium
MLKKTKIVCTQGPSTEKPGVIDALIANGMNCARFNFSHGDHEEHLGRINMVREAAKKAGKVISLILDTKGPEMRLGEFKDGKVMLEKGNKFTLTYDDEPGDETHVSVNHKGLYTEVKPGDTLLLSDGLVALKVDEIKGKDIVTTIQNSGKMSTRKRVAAPGVPLGLPPISEQDAKDIIFGCEQDMDFVAASFIQRPDDVIAIRKLIEEHNGHMEILPKIENLEGVKNFDAILEVSDGIMVARGDLGVEVPAEDVPLIQKEIIRKCNAAGKPVIVATQMLDSMERNPRPTRAEVSDVGNAILDGTDAIMLSGETASGDYPVEAVATMNRIAQRMESSLEYKELYVERGLQHMESRTRAIAHATVQMAYELDAPAIITPTESGYTTKVVSKYRPKAAIVAYTPSEKVLRQLNLRWGVYPVLGTQWSDVDEMISNATAAAVKEDLVQRGDLTIITSGVKMESRTRAIAHATDI

SEQ ID NO: 1702 - protein, 273 aa, Arabidopsis thaliana
MEGIQHPIPRTVEEVFSDFRGRRAGLIKALSTGQLDLSFSIYSVSFDRILDDFYVQKFYHQCDPEKENLCLYGLPNETWEVNLPVEEVPPELPEPALGINFARDGMQEKDWISLVAVHSDSWLISVAFYFGARFGFGKNERKRLFQMINDLPTIFEVVTGNAKQSKDQSANHNSSRSKSSGGKPRHSESHTKASKMSPPPRKEDESGDEDEDDEQGAVCGACGDNYGGDEFWICCDACEKWFHGKCVKITPAKAEHIKHYKCPSCTTSKKMKA

SEQ ID NO: 1703 - protein, 248 aa, Pyrococcus abyssi
MFRDGSLIPYLTAGDPSAKATLRFLLAIEEYSGAIELGIPFSDPIADGKTIQQSHFRALKGGFKLEHAFNIVREFRKHSDVPIVLMTYYNPVFRVGLREFIGKAKDSGVDGMLIVDLPVMHASEFLEVAREEGIKTVFLAAPNTPDERLKEIDKASTGFVYLISLYGTTGARDKIPETAFNLLKRAKRICKNKVAVGFGVSKREHVEMLLNAGANGVVVGSALINIIAEHGENAEEKLREKVRELAGL

SEQ ID NO: 1704 - protein, 153 aa, Triticum aestivum
  unsure (1)..(153): unsure at all Xaa locations
EIQATXSAGSLAEXPVPVAAGXRXLSVSXXMSKVMXKGKTXLIPYIXAXDPDLXTTXXALRXLDALGADVVELGMPFSDASADGXVIKDSAARALAAGATADAIMXMLKEVXPXLSCPVGXFSYFXPIXQXGMGSFXPPVKEXXGERYNNPFL

SEQ ID NO: 1705 - protein, 490 aa, Trigonobalanus verticillata
  unsure (1)..(490): unsure at all Xaa locations
INPTTSDXGVSALEKKNMGRIAQIIGPVLDVTFPPGKMPNIYNALVVKXRDTAGQQINVTCEVQQLLGNNRVRAVAMSATDGLMRGMEVIDTGAPLSVPVGGATLGRIFNVLGEPVDNLGPVDTRTTSPIHRSAPAFIQLDTKLSIFETGIKVVDLLAPYRRGGKIGLFGGAGVGKTVLIMELINNIAKAHGGVSVFGGVGERTREGNDLYMEMKESGVINEQNIAESKVALVYGQMNEPPGARMRVGLTALTMAEYFRDINEQDVLLFIDNIFRFVQAGSEVSALLGRMPSAVGYQPTLSTEMGSLQERITSTKEGSITSIQAVYVPADDLTDPAPATTFAHLDATTVLSRGLAAKGIYPAVDPLDSTSTMLQPRIVGEEHYETAQRVKQTLQRYKELQDIIAILGLDELSEEDRLTVARARKIERFLSQPFFVAEVFTGSPGKYVGLSETIRGFKLILSGELDGLPEQAFYLVGNIDEATAKATNLEM

SEQ ID NO: 1706 - protein, 440 aa, Thermosynechococcus elongatus BP-1
MAKYDTHLKCSFCGKSQEQVRKLIAGPGVYICDECVELCNEILDEELATVPNAAAPRRESTPSRSPRSTPRSRPLSQVPKPRQIKEFLDKHVVGQHEAKKILAVAVYNHYKRLSLLDSDQRGDDNVELQKSNILLIGPTGSGKTLSAQTLAKLLDVPFAVADATTLTEAGYVGEDVENILLRLLQNANMDVEEAQRGIIYIDEIDKIARKSENPSITRDVSGEGVQQALLKILEGTIANVPPQGGRKHPYQDCIQIDTTNILFICGGAFVGLEKTIEQRVGKKAMGFVRDGEPLPKEKRSADILKQLEPHDLVKYGMIPEFIGRIPVVAVLEPLDVAALADILTQPQNALLKQYQKLMRMDSVELRFEPAAVEAIAQEAYRRKTGARALRAIVEEIMLDVMYELPSRKDLRECTITPEMVEKRSTAELLLHPSSLPTLSA

SEQ ID NO: 1707 - protein, 530 aa, Agaricus bisporus
PVDGIRSQIEWNTTLNVSDAPVPTETTKYHRKTAIIATIGPKINTVEKLTDVRLAGVNIVRMNFSHGTHEYHQSVIDNTRQMIKNDPHGRPVAIALDTKGPEIRTGQTRDGNDYPIKAGDEFIVTTDPKYSDICDNKVLFVDYANLASVTAPGKLIYIDDGIISLLILSIDGMNLHVRALNNGTLSSRKGVNLPKTDVDLPPLSEKDKDDLRFGIRNGVDMIFASFIRRGEDVRQIREVLGPDGASIKIIVKIENEQGVANFDEILKEADGVMVARGDLGIEIPASQVFLAQKMMIAKCNIVGKPVIVATQMLESMTYNPRPTRAEVSDVANAVLDGSDCVMLSGETAKGSYPVQSVLMMAETCLLAETAICYPPLYDDLRAVQARPTETAETVAIAAVAAAAEQDAKALLVLSTSGETARLVSKYRPKIPIITVTRNEQTARQIHLHRGCYPFWYPEPRGVQNHQWQTDVDNRIRFGLRNALALNVIQPGASIIAVQGWKGGLGHTNTLRILTVPTDPADLELQPLGSL

SEQ ID NO: 1708 - protein, 305 aa, Prochlorococcus marinus str. MIT 9313
MDSSIDLSLAYADSGVGEVLDQLDCELIGLKPVKTRIREIAALLLVDRARKDLDLASTMPSLHMSFTGRPGTGKTTVAIRISQILHRLGYLRKGHVVTVTRDDLVGQYVGHTAPKTREMIKRAQGGVLFIDEAYYLYKPGNERDYGAEAIEILLQDMESRRGDFVVIFAGYKDKMDAFYQSNPGLSSRVAHHIDFPDYSNRELLAIAQLFLVQQNYYFGDEAEGIFEDYIERRRQLPFFANARSIRNALDRTRLRQANRLFARMGEPLSRDELMTIEPADILASRVFQGEVEGRHPTQPLMESSE

SEQ ID NO: 1709 - protein, 498 aa, Brasenia schreberi
  unsure (1)..(498): unsure at all Xaa locations
MRINPTTSXPGVSTLGKKIPGRIAQIIGPVLDVAFPPGKMPNIYNSLVVXGRDTAGQQINVTCEVQQLLGNNRVRAVAMSATDGLTRGMEVIDTGAPLSVPVGGCTLGRIFNVLGEPVDNLGPVDTRTTSPIHRSAPAFIQLDTKLSIFETGIKVVDLLAPYRRGGKIGLFGGAGVGKTVLIMELINNIAKAHGGVSVFGGVGERTREGNDLYMEMKESGVINEENIAESKVALVYGQMNEPPGARMRVGLTALTMAEYFRDVNEQDVLLFIDNIFRFVQAGSEVSALLGRMPSAVGYQPTLSTEMGSLQERITSTKEGSITSIQAVYVPADDLTDPAPATTFAHLDATTVLSRGLAAKGIYPAVDPLDSTSTMLQPRIVGEEHYETAQRVKQTLQRYKELQDIIAILGLDELSEEDRLTVARARKIERFLSQPFFVAEVFTGSPGKYVGLAETIRGFQLILSGELDSFPEQAFYLVGNIDETTAKAMNLEVESNLKK

SEQ ID NO: 1710 - protein, 372 aa, Cicer arietinum
MHSLYARTHKFSLASPLFLLGLFTINLIPTADAQIGICYGMMGNNLPPANEVIDLYKANNIKRMRLYDPNQAALQALRNSGIELILGVPNSDLQSLATNNDIAIQWVQKNVLNFYPSVKIKYIAVGNEVSPIGGSSWLAQYVLPATQNIYQAIRAKNLHDQIKVSTSIDMTLIGNSFPPSKGSFRSDVRSYLDPFIGYLVYAGAPLLVNVYPYFSYVGNPRDISLPYALFTSPNVMVQDGQYGYQNLFDAMLDSVHAALDNTGIGWVNVVVSESGWPSDGGSATSYDNARIYLDNLIRHVGKGTPRRPWATETYIFAMFDENQKSPELEKHFGVFNPNKQKKYPFGFGGERRNGEIVNDDFNATTVSLKSDM

SEQ ID NO: 1711 - protein, 1324 aa, Oryza sativa
MKDLEKSTSLEVDDSTIDGDVDLGGGLTVVGRKRKDGRGSVDENGASTKRILRSNSMKMHVDAETAGGVALDVCKGDILEKKQCDIIAEGDRGGVLTVDTCNAEEDGEVTGAVVSDAVVEAVRCSANNVESLGLAEVEIAEGNGLDADIQESDGEMDKADDKLSTPSEEQNESGGGTSVGGINDSQENKGVNGLCQGEVIDPLATANGDELSMGLSRSASGRESIEQEDTVMCASDDQKVENHCQFDDKHKEAEISQIELAVDNHIMLTDCTNQKKGIDSPVNETKGDSTPDIVFIRRKSITRKTCEAKQVKSEDEVRFEKRVTRSATVRQREVSASMCVGATNDANLESKERKEDVHHYTRKVGSTVRSKVHHTGVAECDTDTKKKLKGTVTTRRNSDAIANDDPPSITQNKESKTQMKIDIKSQPLTRRGSIVNKTEDAVSGLDQNICSSAITDKNDIELTDSEGVKSENKAAVRKSILSVGAKIVASKKRILESGLDKASGESPVAIPSLKKARDTSSDTELEQPKMSSGKKLTRNNCGSSKKGMSTRRQHQSQTAKLSTSVNCSNKNESKLSQNESDDDGTGSDTSLKNTCVRRTRSGGVVPKKQEDSSESEEPIILRKNHQRGKYSGKRAGSTPRKVKAPKGNRKEVKASSLKSSGPSEQINTGSLREEKQKISDHIKGMLLDAGWTIDLRPRNGRNYLDSVYIPPSGKGSYWSVTKAYAVFLEGMESEKKGRAKDQRPSKKSVGSPGKSHVSEEILSKLKRIVVNKRRTKVELQKLKKRKHGLLKKQKTSKRNSRGSKNKISNSRKLHLGSERKKRGGCALLARGSNKDGGSSTNGFVPYEWKRTVLSWLIDLDIIDINAKLKCVDETHSKVLLEGVTTRDGINCRCCSKVFTVLEFVAHAGGPVSKPYRNVLVDGLDTDLLHCLINAWDKQSDSERQAFFPISTETDDPNDDTCGICGDGGNLICCDGCPSTFHMSCLELEALPSDDWRCAKCSCKFCQEHSRQDAQDIAEVDSSLCTCSQCEEKYHPGCSPETTNTSNVSSQACDLFCQQSCRLLFEGLRNLLAVKKDLEPEFSCRIIQRIHENVPETVVALDERVECNSKIAVALSLMDECFLPIVDQRTGINLIRNVVYNCGSNFVRMDFHGFYIFVLERGDEIIAAASVRIHGTKLAEMPFIGTRNMYRRQGMCRRLLDGIEMILSSLNVEKLIIPAIAELVDTWTSKFGFSSLDVSEKQEVKSTSMLVFPGTGLLQKPLLKKTSPGENSSSQEVDGVFSELESGKTSNVANEDSLCSANAETQGSAAPCYGDNSKDASACND

SEQ ID NO: 1712 - protein, 496 aa, Trifolium repens
MATSNKNMLLNYVPVYVMLPLGVINVNNVFEDPDGLKEQLVQLRAAGVDGVMVDVWWGIIEQKGPKEYDWSAYKSLFQLVQECGLKLQAIMSFHQCGGNVGDVVTIPIPQWVLDIGESDPDIFYTNRSGTRDKEYLTVGVDNKPIFHGRTAIEIYSDYMKSFRENMSEFLKSELIIDIEVGLGPAGELRYPSYPQNQGWVFPGIGEFQCYDKYLKADFKAAAAKAGHSEWELPDDAGTYNDIPESTEFFKTNGTYLTEKGKFFLTWYSNQLLNHGDQILDEANKAFLGCKVKLAIKVSGIHWWYKAQNHAAELTAGYYNLDDRDGYRPIAKMVSRHHGILNFTCLEMRDSEQSSDAQSAPQELVQQVLSGGWRENIEVAGENALSRYDATAYNQIILNARPQGVNKDGPPKLRMYGVTYLRLSDDLLQESNFEIFKKFVVKMHADQSHCDDPQEYNHAIPPLKRSGPNIPVDDLLEATKPILPFPWDSETDMKVDG

SEQ ID NO: 1713 - protein, 402 aa, Tolypella prolifera
LLGDNKVRAVAMSATDGLMRGMEVVDTGVPLSVPVGETTLGRIFNVLGEPVDNLGPVDTTITFPIHRSAPAFTQLDTKLSIFETGIKVVDLLAPYRRGGKIGLFGGAGVGKTVLIMELINNIAKAHGGVSVFGGVGERTREGNDLYMEMKESKVINQDNISESKVALVYGQMNEPPGARMRVGLTALTMAEYFRDVNKQDVLLFIDNIFRFVQAGSEVSALLGRMPSAVGYQPTLSTEMGTLQERITSTKEGSITSIQAVYVPADDLTDPAPATTFAHLDATTVLSRNLAAKGIYPAVDPLDSTSTMLQPWIVGEEHYETAQGVKETLQRYKELQDIIAILGLDELSEEDRLIVARARKIERFLSQPFFVAEVFTGSPGKYVSLIDTIKGFQMILSGELDHL

SEQ ID NO: 1714 - protein, 248 aa, Rosa rugosa
MAYENKPNTVLDSDAQRRLGRGKIEIKRIENTTNRQVTFCKRRNGLLKKAYELSVLCDAEVALIVFSNRGRLYEYSNNSVRETIERYKKACADSSNNGSVSEATTQYYQQEAAKLRAQITTLQNSNRGYMAEGLSNMSIKELKGVETKLEKAISRIRSKKNELLFAEIEYMQKRELDLHNNNQLLRAKIAENERHQQSINAIAGGHGSYDIMQPTQPFHEARNYFQVNALQPNIHQYSRHDQISLQLV

SEQ ID NO: 1715 - protein, 335 aa, Rhodopseudomonas palustris
MLPARRHHPGAGAEPCAGQGRRPRTQAAERSPDGRQHVRPRRQGPRVGRRTSRGQILMTTRIDTRFGELKQQGRPALVTFVMAGDPDLDTSLQILKVLPAAGADVIEIGMPFTDPMADGPAIQAAGLRALKAGTTLKKTLGLVRDFRATDNATPLVLMGYYNPIYIYGVDAFLADAKAAGVDGLIIVDLPPEEDEELCLPAMKAGLNFIRLATPTTDEKRLPAVLANTSGFVYYVSITGITGSASADASAVGAAVQRIKRHTNLPVCVGFGIRTPDAAQAIAAQANGAVVGSALIDALKASLNAEGRATKATVGAVADLVASLAAGVRGAKQAAE

SEQ ID NO: 1716 - protein, 320 aa, Glycine max
CDTNPFLNTILAAGRDFRRERDCSKSGKYREATENYTTALSCNIKYRLFMNWCCCNRAAAHQALGQMADAIADCSVAIALDGNYAKAISRRATLHEMVRDYEQAACDLKRLIAVLETQSNERAKQSDSPSGSNAVKELRQAHQRLLSVEDQAKKGAPLDVYLILGIKSADTATDIKKAYHKAALRHHPDKAGQLLARSEVGDEGQLWKEISQEVYKDADKLFKMIGEAYAVLSDPAKRSEYDLEEEIREASKLCNRGGASSRSSNPYGCGRPFGFDSYKSPSDRTSKQTKWTGSLEDPWTFIFSMVRGYSCHGHQDSFAW

SEQ ID NO: 1717 - protein, 216 aa, Vibrio parahaemolyticus RIMD 2210633
MKYQAAIFDMDGLLLDTERVCMRIFQEACEVQNLPFYEDVYLSIIGRNAAGIETIFRKAYGENLDRLHLEWRTRYNAVVKHQAIPVKDGVVELLEWLKAQGLPIAVATSTAKEVAKIKLELAGLSKYFDNLTTGCEVSHGKPDPEIYFLAANRLDVEPSQCLAFEDSNNGVRAAVAANMVTYQIPDLVEPCDEVKQFGHAIVPSLHEVLAELKQTR

SEQ ID NO: 1718 - protein, 490 aa, Grevillea baileyana
GPGVSTLEEKNLGRIAQIIGPVLDVAFPPGKMPNIYNALVVKGRDTVGQQIAVTCEVQQLLGNNRVRAVAMSATDGLMRGMEVIDTGAPLSVPVGGATLGRIFNVLGEPVDNLGPVDTRTTSPIHRSAPAFIQLDTKLSIFETGIKVVDLLAPYRRGGKIGLFGGAGVGKTVLIMELINNIAKAHGGVSVFGGVGERTREGNDLYMEMKESGVINEQNIAESKVALVYGQMNEPPGARMRVGLTALTMAEYFRDVNEQDVLLFIDNIFRFVQAGSEVSALLGRMPSAVGYQPTLSTEMGSLQERITSTKEGSITSIQAVYVPADDLTDPAPATTFAHLDATTVLSRGLAAKGIYPAVDPLDSTSTMLQPRIVGEEHYEIAQRVKQTLQRYKELQDIIAILGLDELSEEDRLTVARARKIERFLSQPFFVAEVFTGSPGKYVGLAETIRGFQLILSGELDGLPEQAFYLVGNIDEATAKAMNLEVESNLKK

SEQ ID NO: 1719 - protein, 434 aa, Brucella melitensis 16M
MSNFSPREIVSELDRFIIGQKDAKRAVAIALRNRWRRQQLEGQMREEVMPKNILMIGPTGVGKTEISRRLAKLAGAPFVKVEATKFTEVGYVGRDVEQIIRDLVEIAITLVREKRREDVKAKAHLNAEERVLDALVGKTASPVTRDSFRKKLRNGEMDDKEIEIEVSDSGASPNFEIPGMPGANIGVLNISDMLGKAMGGRTKTRKTTVKDSYPILINDESDKLLDQDQIVQEALRVSEDEGIVFIDEIDKIAAREGGSGAGVSREGVQRDLLPLVEGTTVATKYGPVKTDHILFITSGAFHVSKPSDLLPELQGRLPIRVELSALTREDFRRILTETEASLIKQYIALMETEEVKLEFSDDAIDALADIAVDLNATVENIGARRLQTVMEKVLDEISFTAPDKAGATFIIDAAYVKEKIGGLAKNTDLSRFIL

SEQ ID NO: 1720 - protein, 489 aa, Antirrhinum majus
INPTTSGSGVSTLEKKNLGRIVQIIGPVLDVAFPPGKMPNIYNALVVKGRDTAGQPINVTCEVQQLLGNNRVRAVAMSATDGLTRGMEVIDTGAPLSVPVGGATLGRIFNVLGEPVDNLGPVDTGTTFPIHRSAPAFIQLDTKLSIFETGIKVVDLLAPYRRGGKIGLFGGAGVGKTVLIMELINNIAKAHGGVSVFGGVGERTREGNDLYMEMKESGVINEENIAESKVALVYGQMNEPPGARMRVGLTALTMAEYFRDVNEQDVLLFIDNIFRFVQAGSEVSALLGRMPSAVGYQPTLSTEMGTLQERITSTKEGSITSIQAVYVPADDLTDPAPATTFAHLDATTVLSRGLAAKGIYPAVDPLDSTSTMLQPRIVGEEHYETAQRVKETLQRYKELQDIIAILGLDELSEEDRLTVARARKIERFLSQPFFVAEVFTGSPGKYVGLAETIRGFQLILSGELDGLPEQAFYLVGNIDEATAKAMNLE

SEQ ID NO: 1721 - protein, 265 aa, Methanothermobacter marburgensis str. Marburg
MNYAEMFSRVEGCAFVPFVVAGDPDMETSVEIIRTLVDAGADALEIGFPFSDPIADGTSVQEADLRALNSGMTTDDCFRLIERIREFTSVPVGLLVYYNLIYRMGADEFYRRAAEAGVTGILAADLPPEEAGDALRAAERYGIDQIFIVAPTTDNQRLKMISEVSSGFHYLVSVMGVTGARSRVEESTLELIERVKGAGSLPVMVGFGVSQPEHVRMLADAGADGVIVGSAIIDLISKNLDDRERMLQEIYEMVRKMKTAAGGSR

SEQ ID NO: 1722 - protein, 479 aa, Wigglesworthia glossinidia endosymbiont of Glossina brevipalpis
MHRIIRRTKIVATLGPSTDLNNNLEKMILAGANMVRMNFSHGNFYDHARRTKQVRNISHKLGKNIAILGDLQGPKIRISTFMTGKVFLSPGDQFILDASLSKDLGTVESVGIDYKYLPKDVFPGDVLLLDDGRIQLKVKKIVNKKIFTTVYIGGYLYNNKGINKLGGGLSANSLTEKDKKDIICAAKIGIDYLAVSFPRTGKDLKYARNLLNNVESHAKIISKIERAEAVANNDIIDEIITESDAIMVARGDLGIEIGDPELVGVQKKLIQRARDLNRAVITATQMMESMVYNPMPTRAEVMDVANAVLDGTDAVMLSAETAIGKYPVETVESMSNVCIGAEKISNINSLKNRLNIKFKTVEESMAVSAMYIANHLNMIKAIISLTESGKTPLIMSRISSGLPIFALSKHEHTLNLTALYRGVTPVYFKNNEKGISAADSAINLLKEKKFLFSGDFVVITQGDVMGTIGKTNTSRILIV

SEQ ID NO: 1723 - protein, 545 aa, Saccharomyces cariocanus
  unsure (1)..(545): unsure at all Xaa locations
ISQSLSKYSNSDAIIYVGCFAKGTTVLMADGSIECIENIKIGDKVMGKDGKPREVIKLPRGNETMYSVVQKSQHRAHKTDSSREVPDLLKFTCNSTHELVVRTPRSVRRVSRTMKGVEYFEVISFEMVQKKVPDGRIIELVKEVSKSYPASEGPERADELVESYRKASTKPYFEWTVEARDLSLLGSHVRKATYQTYAPILYENDYFFNYMENSKFHPTIEAPKVLAYFLGLWIGDGLTDRTTFSIDSRDTSLMERVTEYAEKLDLCAEYKDRKEPKVAKTVNLYSKSVRXNGIRNNLNTENPLWDAIVGLGFLKDGVKNIPSFLSTDNIGTRETFLAGLIDSDGYVTDEHGITATVKTIHTSVRDGLVSVARSLGLVISVNAEPAKIDMSGTSHKMCYAIYMSGGDILLNVLSKCASFKKFRPAPVAPPVRECRGFYFELQELEEDDYYGITLSDDSDHQFLLANQVVVHNCGERGNEMAEVLMEFPELYTEMSGTKEPIMKRTTLVANTSNMPVAAREASIYTGITLAEYFRDQGKNVSMIAD

SEQ ID NO: 1724 - protein, 258 aa, Bacillus anthracis str. A2012
MGVERIKAAFENGKKAFIPYVMGGDGGLEILKERIRFLDEAGASIVEIGIPFSDPVADGPTIQRAGKRALDSGVTVKGIFQALIEVRKEVQIPFVLMTYLNPVLAFGKERFIENCMEAGVDGIIVPDLPYEEQDIIAPLLREANIALIPLVTVTSPIERIKKITSESEGFVYAVTVAGVTGVRQNFKDEIHSYLEKVKSHTHLPVVAGFGISTKEHVEEMVTICDGVVVGSKVIELLENEKREEICEFIQATKQKEEA

SEQ ID NO: 1725 - protein, 270 aa, Pseudomonas syringae pv. tomato str. DC3000
MSRLEQRFAQLKTEGRAVLVTFITAGDPGYDTSLKVLKGLPAAGADVIELGMPFTDPMADGVAIQLATLRALDAGQTLLKTLQMVSEFRVDDQTTPIVLMGYYNPIHRFGVEAFVAQAKEAGVDGLIIVDLPPEHDAELATPAQASGIDFIRLTTPTTDDARLPRVLERSSGFVYYVSVAGVTGAGSATTEHVTEAIARLRRHTSLPISVGFGIRTPEQAAAIARLADGVVVGSAFVDKIATAESPEQAIDGVLTLCAALAEGVRNARVS

SEQ ID NO: 1726 - protein, 462 aa, Escallonia rubra
PPGKMPNIYNALVVKGRDTGGQPINVTCEVQQLLGNNRVRAVAMSATDGLTRGMEVIDTGAPLSVPVGGATLGRIFNVLGEPVDNLGPVDTRTTSPIHRSAPAFIQLDTKLSIFETGIKVVDLLAPYRRGGKIGLFGGAGVGKTVLIMELINNIAKAHGGVSVFGGVGERTREGNDLYMEMKESGVINEQNIGESKVALVYGQMNEPPGARMRVGLTALTMAEYFRDVNEQDVLLFIDNIFRFVQAGSEVSALLGRMPSAVGYQPTLSTEMGSLQERITSTKEGSITSIQAVYVPADDLTDPAPATTFAHLDATTVLSRGLAAKGIYPAVDPLDSTSTMLQPRIVGEEHYEIAQRVKQTLQRYKELQDIIAILGLDELSEEDRLTVARARKIERFLSQPFFVAEVFTGSPGKYVGLAETIRGFQLILSGELDGLPEQAFYLVGNIDEATAKAMNLEMESNLK

SEQ ID NO: 1727 - protein, 243 aa, Sulfolobus solfataricus
MGKMLVVYMTLGYPNVQSFKDFIIGAVENGADILELGIPPKYAKYDGPVIRKSYDKVKGLDIWPLIEDIRKDVGVPIIALTYLEDWVDQLENFLNMIKDVKLDGILFPDLLIDYIDDLDKIDGIIKNKGLKNVIFTSPSVPDLLIHKVSKISDLFLYYGVRPTTGVPIPVSVKQLINRVRNLVENKLIVGFGLSSESDLRDALSAGADGIAIGTVFIEEIERNGVKSAINLVKKFRAILDEYK

SEQ ID NO: 1728 - protein, 497 aa, Bifidobacterium longum NCC2705
MYFKDGNDNAQRGGSTVRRSRQRRIMGRVVSYNEDVPRCTFCGKTEHQVRKLVAGPNASICDECIALCVDIISEERVKDAEVNSLSLPKPAQIFDYLNRYVIGQENAKRALSVAVYNHYKRVNMELQESAEQLDGNNGHSGQTSKQAKQSVPTQTRATRRSNDPLADVEVAKSNILLLGPTGVGKTYLAQALARVMNVPFVITDATTLTEAGYVGDDVETVLQRLLQAADGDVSRAQHGIIYIDEIDKIARKSGENTSITRDVSGEGVQQALLKILEGTIASVPLEGTRKHKEQDVAQMDTRGILFICGGAFVGLTDIVRKRLGRRETGFGANWHDADMKDEELLEQVNADDLAEFGLLPEFIGRLPVTSVLKELTVDDLTAILTQPANALIKQYRKLFAVDGVDLQFTEQAIRAIADIAIKQGTGARGLRSIIERTLQDTMFQLPSLDDVRQVIVDKASVEGSSTPKLLREAVDVPQGRLKVAQSVLLDRVRTHEA

SEQ ID NO: 1729 - protein, 492 aa, Arabidopsis thaliana
MLLRTMAATSPRPPPSTSLTSQQPPSPPSQLPLRTMPGSYGWPLVGPLSDRLDYFWFQGPDKFFRTRAEKYKSTVFRTNIPPTFPFFGNVNPNIVAVLDVKSFSHLFDMDLVDKRDVLIGDFRPSLGFYGGVCVGVNLDTTEPKHAKIKGFAMETLKRSSKVWLQELRSNLNIFWGTIESEISKNGAASYIFPLQRCIFSFLCASLAGVDASVSPDIAENGWKTINTWLALQVIPTAKLGVVPQPLEEILLHTWPYPSLLIAGNYKKLYNFIDENAGDCLRLGQEEFRLTRDEAIQNLLFVLGFNAYGGFSVFLPSLIGRITGDNSGLQERIRTEVRRVCGSGSDLNFKTVNEMELVKSVVYETLRFNPPVPLQFARARKDFQISSHDAVFEVKKGELLCGYQPLVMRDANVFDEPEEFKPDRYVGETGSELLNYLYWSNGPQTGTPSASNKQCAAKDIVTLTASLLVADLFLRYDTITGDSGSIKAVVKAK

SEQ ID NO: 1730 - protein, 1223 aa, Oryza sativa
  unsure (1)..(1223): unsure at all Xaa locations
MDCNKDEAVKAKALAEKKMREKDFAGAKRMINKAQNLSKDVDSNISQMLTVCDIHCASATKVNGEIDWYGILQVPVTADDTLIKKQYRKLALLLHPDKNNFAGAEAAFKLVGEANMTLTDRSKRSVYDMKRNASVRIGSARVPYQQSRRTAPVRPTTTPVNLHNVHQSQQHKPSNPSDSQTFWTICPTCGMRYQYYLSILKKALRCQNCLKPFVALDLNEQAVPSGANQRSAGVWKSSGAPQNFPGSQANVGQQAQNSANPVHANFGSHNAHVETKRGADGNEAGGLKNKRKFAKATGNSSKASSVAGSKKRRKAMFESSESSASDTSTDSEEEIIEDGPAASNVGPDQHPRRSSRQKQEVKYNEDSDGDDTDCHGKGDDGFVSSPSLKRLRKGGLFHERGSACAEQIKRETMSGGGNSAEKEKLSHSVSNNGLESNSDDAPNEVICADSEFFDFNQLRHINQFKANQIWACYDSQSCMPRYYARITKVNVPKFMLNFIWLEFDPKNKAEAAWSSGDLPVSCGRFKHGVSDTAKESSMFSHAIFYEKNKTRNSYEIYPRKGEVWALFKGWDIDWSADADKHKNYEYEVVQVLSDLTSSTSIIVMPLVKIKGFVSLFIQSKEASPYVIPQDDTLRFSHCVPRHTMIGTEKEGIPEGAIELDPAALPLNFGVAFASVVPESVLXSVKVQGSGAEHIGSSSGNNCHKGSVDVGESQQHAQIQGSLQGQQRQRSMSTTLDYPESEFFEFPEIRSIHKFXQPGQIWALYSDVDKFPNYYACIKTVDVKNNELQVRWLDACPQSEEERRLVREDLTVACGTFKISSFRIQTYNGTEYLSHPVQAKPGRRNEYEIVPCQGDIWAVFKNWRTGWTAKDYKKCDYELVEIFGHTDSSIQVQLLRKVDGYRAVFMPDRREGAVKTIRKDEYPKFSHQIPCFHLTNERGGKLRGFLELDPLLPIDHHRGNDELDSVQCFCDGNGQTPCCSSPKQAAIRFCLGQDELKAASPMSPLLSDKCRRARAAMSSSPAPVESPWLTMRAMRRVGGADGGGGQRSALMVASYPVLLLLVVLAAFVKYVWIALALYSALLLLFSCASRRLALAERLPSPLGGGGGGGGVAAVTAAEELQGAAARGGVSGETLASIPAFAYDASAHGGGGEAAAQCAVCLEALRGGETARRLPSCAHTFHVACIDMWLGSHATCPVCRRRVERKHKGGVLPPMPPEPETEPPV

SEQ ID NO: 1731 - protein, 242 aa, Shigella dysenteriae
LKERKEGAFVPFVTLGDPGIEQSLKIIDTLIEAGADALELGIPFSDPLADGPTIQNATLRAFAAGVTPAQCIEMLALIRQKHPTIPIGLLMYANLVFNKGIDEFYAQCEKVGVDSVLVADVPVEESAPFRQAALRHNVAPIFICPPNADDDLLRQIASYGRGYTYLLSRAGVTGAENRAALPLNHLVAKLKEYNAAPPLQGFGISAPDQVKATIDAGAAGAISGSAIVKIIEQHINEPEKML

SEQ ID NO: 1732 - protein, 335 aa, Oryza sativa
  unsure (1)..(335): unsure at all Xaa locations
XLIWDGRTNPARASKNRTSVAWETYTLKELLQATGNFSESNKLGEGGFGTVYWGRTSKGVEIAVKRLKAMTAKAEMEFAVEVEILGRVRHRNLLSLRGFYAGGDERLIVYDYMPNHSLLTHLHPHRGTPSSHHHVPLEWPRRVAIAVGAAEGLSYLHHEASPHIIHRDIKASNVLLDAEFVPKVADFGFAKLIPDGVSHLTTRVKGIGYLAPEYAMWGKVSESCDVYSFGVLLLELVSARRPLEKLPGGVKREIVQWAAPLVERRRWERLADPRLAGRFDAAQLRAVVETAMLCTQSSAESRPAMAEVVDMLRFSGGERXAPRRSSPFFMFHNIX

SEQ ID NO: 1733 - protein, 317 aa, Rhodospirillum rubrum
MRILRHPYELPASLLGGSLALGNFDGVHRGHQRVIGSARAIAAQQGLPLGVMTFAPHPRRFFQPDLPPFTLTSFRLKAHLISEEGADFLYVQAFDEALSKGSAEWFVTEVLVKGLHVAHVVVGQDYAFGHRRQGTVSLLQKMALDLGFGVTAVAPVKDEGGAIYSSTRVRACLQEGDVTTAAQILGHPWEVEGRVEHGDKRGRTIGFPTANLKLGDYQRPRAGVYAVTAGLDDGAQTRFRPGVANFGRRPTFDNGDALLEVHLFDVSPDLYGRHLRVRFHDFLRPEQTFPGLEALKAQIGQDAAQARALFGLPPAAP

SEQ ID NO: 1734 - protein, 479 aa, Mytilaria laosensis
  unsure (1)..(479): unsure at all Xaa locations
LXKKNLGRIAQIIGPVLDVAFPPGKMPNIYNALVVKGRDTVGQEINVTCEVQQLLGNNRVRAVAMSATDGLMRGMGVIDTGAPLSVPVGGATLGRIFNVLGEPVDNLGPVDTRTTSPIHRSAPAFIQLDTKLSIFETGIKVVDLLAPYRRGGKIGLFGGAGVGKTVLIMELINNIAKAHGGVSVFGGVGERTREGNDLYMEMKESGVINEQNIAESKVALVYGQMNEPPGARMRVGLTALTMAEYFRDVNEQDVLLFIDNIFRFVQAGSEVSALLGRMPSAVGYQPTLSTEMGSLQERITSTKEGSITSIQAVYVPADDLTDPAPATTFAHLDATTVLSRGLAAKGIYPAVDPLDSTSTMLQPRIVGEEHYETAQRVKQTLQRYKELQDIIAILGLDELSEEDRLTVARARKIERFLSQPFFVAEVFTGSPGKYVGLAETIRGFQLILSGELDGLPEQAFYLVGNIDEATAKAMNLEME

SEQ ID NO: 1735 - protein, 376 aa, Pseudocarteria mucosa
VAMNPTDGLTRGMEVLDTGRPLSVPVGKVTLGRIFNVLGEPVDNLGPVETEETLPIHRQAPAFVDLDTRLSIFETGIKVVDLLAPYRRGGKIGLFGGAGVGKTVLIMELINNIAKAHGGVSVFAGVGERTREGNDLYTEMKESGVIVEKNLSDSKVSLVYGQMNEPPGARMRVALTALTMAEYFRDVNKQDVLFFIDNIFRFVQAGAEVSALLGRMPSAVGYQPTLATEMGALQERITSTKDGSITSIQAVYVPADDLTDPAPAVTFSHLDATTVLSRNLAAKGIYPAVDPLESTSTMLQPWILGEKHYECAQSVKKTLQRYKELQDIIAILGLDELSEEDRLIVARARKIERYLSQPFFVAEVFTGSPGKYVSLA

SEQ ID NO: 1736 - protein, 338 aa, Corynebacterium ammoniagenes
MDIWYGTAAVPKDLDNSAVTIGVFDGVHRGHQKLINATVEKAREVGAKAIMVTFDPHPVSVFLPRRAPLGITTLAERFALAESFGIDGVLVIDFTRELSGTSPEKYVEFLLEDTLHASHVVVGANFTFGENAAGTADSLRQICQSRLTVDVIDLLDDEGVRISSTTVREFLSEGDVARANWALGRHFYVTGPVVRGAGRGGKELGFPTANQYFHDTVALPADGVYAGWLTILPTEAPVSGNMEPEVAYAAAISVGTNPTFGDEQRSVESFVLDRDADLYGHDVKVEFVDHVRAMEKFDSVEQLLEVMAKDVQKTRTLLAQDVQAHKMAPETYFLQAES

SEQ ID NO: 1737 - protein, 496 aa, Heuchera sanguinea
INPTTSDPGVSTLEKKNLGRIVQIIGPVLDVAFPPGKMPNIYNALVVKGRDTVGQEINVTCEVQQLLGNNRVRAVAMSATDGLRRGMDVIDTGAALSVPVGGATLGRIFNVLGEPVDNLGPVDTRTTSPIHRSAPAFIQLDTKLSIFETGIKVVDLLAPYRRGGKIGLFGGAGVGKTVLIMELINNIAKAHGGVSVFGGVGERTREGNDLYMEMKESGVINEQNIAESKVALVYGQMNEPPGARMRVGLTALTMAEYFRDVNEQDVLLFIDNIFRFVQAGSEVSALLGRMPSAVGYQPTLSTEMGTLQERITSTKEGSITSIQAVYVPADDLTDPAPATTFAHLDATTVLSRGLAAKGIYPAVDPLDSTSTMLQPRIVGEEHYEIAQRVKQTLQRYKELQDIIAILGLDELSEEDRLTVARARKIERFLSQPFFVAEVFTGSPGKYVGLAETIRGFQLILSGELDSLPEQAFYLVGNIDEVTAKAMNLEMESNLKK

SEQ ID NO: 1738 - protein, 423 aa, Yersinia enterocolitica
MTDKRKDGSGKLLYCSFCGKSQHEVRKLIAGPSVYICDECVDLCNDIIREEIKEVAPHRERSSLPTPHEIRRHLDDYVIGQEPAKKVLAVAVYNHYKRLRNGDTSNGIELGKSNILLIGPTGSGKTLLAETLARFLDVPFTMADATTLTEAGYVGEDVENIIQKLLQKCDYDVQKAQRGIVYIDEIDKISRKSDNPSITRDVSGEGVQQALLKLIEGTIAAVPPQGGRKHPQQEFLQVDTSKILFICGGAFAGLDKVIGQRINTGSGIGFGATVKGKSEKATEGELLRQAEPEDLIKFGLIPEFIGRLPVVATLSELSEDALIQILKEPKNALTKQYQALFNLEGVELEFRDEALTAIAKKAMARKTGARGLRSIVEGALLDTMYDLPSMESVEKVVVDESVIAGQSAPMLIYGQPEAQASGE

SEQ ID NO: 1739 - protein, 105 aa, Glycine max
TPRPPTSFPSNSRLLGLVGHSGPLVSRGQKVTANNLVASSAASPLPMPPQAMARSFSIPSSGARVAALHMPRTLESSHRSSISENIASPPLMPISLSSSRPSLDG

SEQ ID NO: 1740 - protein, 258 aa, Bacillus cereus ATCC 14579
MGVEKIKAAFENGKKAFIPYVMGGDGGLEKLKERIRFLDEAGASIVEIGIPFSDPVADGPTIQRAGKRALDSGVTLKGIFQALAEVRKEVQMPFVLMTYLNPVLAFGKERFIENCIEAGVDGIIVPDLPYEEQNIIAPLLREVNIALIPLVTVTSPIERIEKITSESEGFVYAVTVAGVTGVRQNFKEEIHSYLEKVKSHVNLPVVAGFGISTKEHVEEMVTICDGVVVGSKVIELLENEKREEICELIYATKQKEEA

SEQ ID NO: 1741 - protein, 257 aa, Brucella melitensis 16M
MPVVFSLSRIARREALPAGSKCFNKKVTLMAAPSLIIFDCDGVLVDSEIIAAEVESALLTESGYPIAADEMAERFAGLTWQDILLTVERAAGIPLSASLLDKSERILDEKLKNEVNAVEDIVEVVSALKLPKCICSNSTSLRLENMLKRVGPYELFAPNIFSAKEVGSGKTKPAPDVFLHAARHFGVDPANVLVIEDSVHGVHGARAAGMRVIGFTGGAHTYPGHADKLTDAGAETVIHRHKDLQSVIDALSIWTDA

SEQ ID NO: 1742 - protein, 487 aa, Lysimachia minoricensis
MRINPTTSGPGTSVLEKKNLGRIIQIIGPVLDVSFPPGKMPNIYNALVVKGRDTAGQPINVTCEVQQLLGNNRVRAVAMSATDGLTRGMEVIDTGAALSVPVGGATLGRIFNVLGEPVDNLGPVDTRTTSPIHRSAPAFIQLDTKLSIFETGIKVVDLLAPYRRGGKIGLFGGAGVGKTVLIMELINNIAKAHGGVSVFGGVGERTREGNDLYMEMKESGVINEENIAESKVALVYGQMNEPPGARMRVGLTALTMAEYFRDVNEQDVLLFIDNIFRFVQAGSEVSALLGRMPSAVGYQPTLSTEMGSLQERITSTKEGSITSIQAVYVPADDLTDPAPATTFAHLDATTVLSRGLAAKGIYPAVDPLDSTSTMLQPRIVGEEHYEIAQRVKETLQRYKELQDIIAILGLDELSEDDRLTVARARKIERFLSQPFFVAEVFTGSPGKYVGLAKTIRGFQLILSGELDGLPEQAFYLVGNIDEASAKA

SEQ ID NO: 1743 - protein, 650 aa, Oryza sativa
  unsure (1)..(650): unsure at all Xaa locations
TSSRHRHRRSEGRRRRPPPPPPSSSPPAAMAFGDRITTFEDSEKESEYGYVRKVSGPVVVADGMGGAAMYELVRVGHDNLFGEIIRLEGDSATIQVYEETAGLMVNDPVLRTRKPLSVELGPGILGNIFDGIQRPLKTIAIKSGDVYIPPGVSVPALDKDALWHFKPEKLGVGDIITGGDLYAIVNENTLMQHKVALPPGAMGKISYIAPAGQYSLQDTVLELEFQGIKKEFTMLQTWPVRSPRPVMEKLAADTPLLTGQRVLDALFPSVLGGTCAIPGALGCGKTVISQALSKYSNSQAVVYVGCGERGHEMAEGLMDFPQLTMTTEDGREESVMKRTTLVANTSNMPVAAREASIYTGITIAEYYRDMGYNVSMMADSTSRWAEALREISGRLAEMPADSGYPAYLAARLASFYERAGKVRCLGSPKRDGSVTIVGAVSPPGGDFSDPVTSATLSXVQVFWGLDKKLAQRKHFPSVNWLISYSKYSKALEPHYEREDPDFIDIRTKAREVLQREDDLNEIVQLVGKDALAESDKITLETAKLLREDYLAQNAFTPYDKYCPFYKSVWMMRNIIHFNTLATQAVERAAGADGQKITYSVIKHRMGDLFYRLVSQKFEDPAEGKEVLIAKFQKLYDDLTAGFRNLEDEAR

SEQ ID NO: 1744 - protein, 467 aa, Escallonia resinosa
GSGVSTLEKKNSGRIAQIIGPVLDVAFPPGKMPNIYNALVVKGRDTDRQPINVTCEVQQLLGNNRVRAVAMSATDGLTRGMEVIDTGAPLSVPVGGATLGRIFNVLGEPVDNLGPVDTRTTSPIHRSAPAFIQLDTKLSIFETGIKVVDLLAPYRRGGKIGLFGGAGVGKTVLIMELINNIAKAHGGVSVFGGVGERTREGNDLYMEMKESGVINEQNIGESKVALVYGQMNEPPGARMRVGLTALTMAEYFRDVNEQDVLLFIDNIFRFVQAGSEVSALLGRMPSAVGYQPTLSTEMGSLQERITSTKEGSITSIQAVYVPADDLTDPAPATTFAHLDATTVLSRGLAAKGIYPAVDPLDSTSTMLQPRIVGEEHYEIAQRVKQTLQRYKELQDIIAILGLDELSEEDRLTVARARKIERFLSQPFFVAEVFTGSPGKYVGLAETIRGFQLILSGELDGLPEQAFY

SEQ ID NO: 1745 - protein, 255 aa, Daucus carota subsp. sativus
MSFVDDQSGDLSLHERKSGRGKIEIKRIENTTNRQVTFCKRRNGLLKKAYELSVLCDAEVALIVFSNRGRLYEYANNSVRGTIERYKKANSDTPNTATVSEANTQYYQKEAARLRQQISNLQNSNRHLMGEALGAVPAKELKGLETKLQNGLSRVRSKKNELLFAEIEFMRKREIDLHNNNQYLRAKISENERAQQQMSLMPGASGSSEQYRDVGQPHESFDARNYLQVNGLQPNNANYSSHQDHQTQHVPLQLV

SEQ ID NO: 1746 - protein, 463 aa, Oryza sativa (japonica cultivar-group)
MARKQHIAIFTTASLPWMTGTAVNPLFRAAYLAKAGDWEVTLVVPWLSKGDQLLVYPNKMKFSVPGEQEGYVRRWLEERIGLLPKFEIKFYPGKFSTEKRSILPAGDITQTVSDDKADIAVLEEPEHLTWYHHGRRWKNKFRKVIGVVHTNYLEYVKRERNGYIHAFLLKHINSWVTDIYCHKVIRLSAATQEVPRSIVCNVHGVNPKFIEIGKLKHQQISQREQAFFKGAYYIGKMVWSKGYTELLQLLQKHQKELSGLKMELYGSGEDSDEVKASAEKLNLDVRVYPGRDHGDSIFHDYKVFINPSTTDVVCTTTAEALAMGKIVICANHPSNEFFKRFPNCHMYNTEKEFVRLTMKALAEEPIPLSEELRHELSWEAATERFVRVADIAPIMSIKQHSPSPQYFMYISPDELKKNMEEASAFFHNAISGFETARCVFGAIPNTLQPDEQQCKELGWRLQE

SEQ ID NO: 1747 - protein, 489 aa, Echium vulgare
GSGVSMLEKKNLGRVVQIIGPVLDVAFSPGKMPNIYNALVVKGRDTVGQPINVTCEVQQLLGNNRVRAVAMSATDGLTRGMEVIDTGAALSVPVGGATLGRIFNVLGEPVDNLGPVDTRTTSPIHRSAPAFIQLDTKLSIFETGIKVVDLLAPYRRGGKIGLFGGAGVGKTVLIMELINNIAKAHGGVSVFGGVGERTREGNDLYMEMKESGVINEENIAESKVALVYGQMNEPPGARMRVGLTALTMAEYFRDVNEQDVLLFIDNIFRFVQAGSEVSALLGRMPSAVGYQPTLSTEMGTLQERITSTKAGSITSIQAVYVPADDLTDPAPATTFAHLDATTVLSRGLAAKGIYPAVDPLDSTSTMLQPRIVGEEHYETAQRVKETLQRYKELQDIIAILGLDELSEEDRLTVARARKIERFLSQPFFVAEVFTGSPGKYVGLAETIRGFQLILSGELDGLPEQAFYLVGNIDEATAKAMNLEMESNLK

SEQ ID NO: 1748 - protein, 138 aa, Ipomoea umbraticola
HAAELTAGFYNVAGRDGYRPIARMLARHHATLNFTCLEMRDSEQPAEAKSAPQELVQQVLSGGWKEYIDVAGENALPRYDATAYNQMLLNVRPNGVNLNGPPKLKMSGLTYLRLSDDLLQTDNFQLFKKFVKKMHADL

SEQ ID NO: 1749 - protein, 347 aa, Cichorium intybus x Cichorium endivia
MALHTPGQVAPLLLLLGMVVNFHIFIDAQAVGVCYGRVAVPGSLPSEEATVNLYQQNGITAMRIYDPNQATLQALQGIDIELMLDVPNSELESLNNPVAATTWVRNNIQNYPGVNFRYIAVGNEVDPNNNATSDYVKLVLPAMRNVHQAIVDASLANQIKVSTATYTGLLENSYPPSDGVFHENVKAFIEPIIAFLVQNNLPMLANIYPYFAAQGSMQVNLSYALLQPDAPVVNDNGIMYSNLFDAMLDAHYAAQAPFGGENLEIVVSESGWPSCCDSIATVENAGTYYRNLIGHVTQVGGTSAKPGKSIETYQFAMFDENIKDGDESEKHFGIFSPNQTPKYQVNF

SEQ ID NO: 1750 - protein, 329 aa, Glycine max
KNNYWMELARPASSRRKLKDLLHQSGNRLCADCNAPDPKWASANIGVFICLKCCGVHRSLGTHISKVLSVTLDDWSEDEIDAMIEVGGNVSANSIYEAYIPEGYTKPGPDAGHEQRSKFIRSKYELQEFLKPSLRIVSGKSSLQSSSAKSSFMDSFKSTSSSQRMEGMVEFIGMLKVKVIKGTNLAIRDIKSSDPYVVLSLGQQTVQTTIIWSNLNPVWNEEYMLSVPEHYGQIKLKVFDHDTFSADDIMGEADIDLQSLITSAMAFGDAGMFGDMQIGKWLKSDDNALIEDSTVNIVDGKVKQMMSLKLQDVESGELDLELEWIPLEQ

SEQ ID NO: 1751 - protein, 425 aa, Sinorhizobium meliloti
MSKVSGSNGGDSKNTLYCSFCGKSQHEVRKLIAGPTVFICDECVELCMDIIREENKTSMVKSRDGVPTPQEIIKVLDEYVIGQQQAKRILSVAVHNHYKRLAHAAKSSDVELAKSNIMLVGPTGCGKTYLAQTLARIIDVPFTMADATTLTEAGYVGEDVENIILKLLQAADYNVERAQRGIVYIDEVDKISRKSDNPSITRDVSGEGVQQALLKIMEGTVASVPPQGGRKHPQQEFLQVDTTNILFICGGAFAGLDKIISARGEKTSIGFGATVRAPEDRRVGEVLRELEPEDLVKFGLIPEFIGRLPVLATLEDLDEDALIQILSEPKNALVKQYQRLFEMEDVELNFHEDALREIARRAIVRKTGARGLRSIMEKILLDTMFELPTLEGVREVVISDEVVKGTARPLYIYSERSEEKTNVSA

SEQ ID NO: 1752 - protein, 483 aa, Agave ghiesbreghtii
  unsure (1)..(483): unsure at all Xaa locations
SGSAVXTLEEKNXGRIAQIIGPVLDVVFPPGKMPNIYNALVVKGRDTVGQQINVTCEVQQLLGNNRVRAVAMSATDGLTRGMEVIDTGAALRVPVGGATLGRIFNVLGEPVDNLGPVDTRTTSPIHRSAPAFIQLDTKLSIFETGIKVVDLLAPYRRGGKIGLFGGAGVGKTVLIMELINNIAKAHGGVSVFGGVGERTREGNDLYMEMKESGVINEKNIAESKVALVYGQMNEPPGARMRVGLTALTMAEYFRDVNEQDVLLFIDNIFRFVQAGSEVSALLGRMPSAVGYQPTLSTEMGSLQERITSTKEGSITSIQAVYVPADDLTDPAPATTFAHLDATTVLSRGLAAKGIYPAVDPLDSTSTMLQPRIVGEEHYETAQRVKETLQRYKELQDIIAILGLDELSEEDRLTVARARKIERFLSQPFFVAEVFTGSPGKYVGLAETIRGFQLILSGELDSLPEQAFYLVGNIDEATAKAMNL

SEQ ID NO: 1753 - protein, 395 aa, Isoetes engelmannii
PVGEATLGRIFNVLGEPVDNSGSVDASTTFPIHRPAPAFTQLDTKLSIFETGIKVVDLLAPYRRGGKIGLFGGAGVGKTVLIMELINNIAKAHGGVSVFAGVGERTREGNDLYMEMKESKVINEQNISESKVALVYGQMNESPGARMRVGLTALTMAEYFRDVNKQDVLLFIDNIFRFVQAGSEVSALLGRMPSAVGYQPTLSTEMGTLQERITSTKEGSITSIQAVYVPADDLTDPAPATTFAHLDATTVLSRGLAAKGIYPAVDPLDSTSTMLQPWIVGEQHYETAQGVKQTLQRYKELQDIIAILGLDELSEEDRLTVARARKIERFLSQPFFVAEVFTGSPGKYVTLVETIKGFQMILSGELDGLPEQAFYLVGNIDEATAKAATLQAFGE

SEQ ID NO: 1754 - protein, 446 aa, Thermoproteus tenax
MFTKIVATLGPSTDRLPDITALLSKVHGVRINMSHASPSEVEARVNAVRKYEETSGRYIAIIADLRGPSVRTGLMRPLQITAGARVSFKLAEKGDGFVPVPRREFFEVIEEGDEVLMLDGKLVLRIISAAQTSAEAESLSSGVISSNKAIVVKGKEYHIEQPVEEDIRALQTLSRFRDDVDYVALSLVRDGADVRKMRSVVEEAGLTSGIMAKIETKSAVDKIEEIINAADYIVIARGDLALHYGLEYIPKVQRLLVERSLSAGRPVAVATQLLDSMQTNTTPTRAEVNDVYTTASLGVDSLWLTNETASGEHPLEAVDWLRRIVSQVEFGRLKAASPADARDRFAKAVVDMAEDMGGEIAVYSMTGTLAKRIAKFRPMTTVYVGVNERRLARMLELREDVGAHMGPRACGRAGAYLRGGPREAPLQILRQSLDSHVWAQRRHTYY

SEQ ID NO: 1755 - protein, 486 aa, Stackhousia minima
  unsure (1)..(486): unsure at all Xaa locations
PEVYALEKKNPXRFAQIIGPVLDVAFYPGKMPNIYNALIVKGRDTSGQTINVIGEVQQLLGNNQVRAVAMSATDGLMRGMDVIDTGAPLSVPVGGATLGRIFNVLGEPVDNLGPVDTRTTSPIHKSAPAFIELETKFSIFETGIKVVDLLAPYRRGGKIGLFGGAGVGKTVLIMELINNIAKAHGGVSVFGGVGERTREGNDLYMEMKESGVINEENIAESKVALVYGQMNEPPGARMRVGLTALTMAEYFRDVNEQDVLLFIDNIFRFVQAGSEVSALLGRMPSAVGYQPTLSTEMGSLQERITSTKKGSITSIQAVYVPADDLTDPAPATTFAHLDATTVLSRGLAAKGIYPAVDPLDSTSTMLQPRIVGEEHYETAQRVKQTLQRYKELQDIIAILGLDELSEEDRLTVARARKIERFLSQPFFVAEVFTGSPGKYVGLAETIRGFKLILSGELDGLPEQAFYLVGNIDEATTKATNLEMENK

SEQ ID NO: 1756 - protein, 772 aa, Oryza sativa (japonica cultivar-group)
MRRPRSRGAAKQTRLREADEIRLLEAWIDAGKPARGTRPPPLSKSSSSPADTAAAKRGAKGAGGVPSKAAGEHPEYGACARFDELPLSNKTKDGLRKAGYTEMSEIQRAALPHALCGRDVLGAAKTGSGKTLAFVIPALEKLYRERWGPEDGVGCIVLSPNKDLAGQIFNVFQKVGKLHGFSAACIVGNRKGLDEEKAVINNMNILVCTPGRLLQHMGETTNFDCSQIQILVIDEADQVLDKNFQEQVDNVVSQLPKVRQTLLFSATQTKSVKDLARVSLKDPEYISVHEEATTATPDTLEQYAMIVPLEQKLNMLWSFIKRHLKSRILVFLSSVKQVKFVYEVFKKLRPGISLRCMHGRMKYEVQQAIVAEFKEGHSVLFSTDIFARGLDIEDVDWVVQVDCPENIALYIHRVGRTARYNKRGKALIFLCPEEEKMLEKLKAAESKIPIHIKKPNTEQLQQISQNIASVLVQYPNLQQLGKRAFVTYLKSVYLQSDKEVFDLSRFSMENFAAYAASLGLPVTPKIRFVSHKKNVPKKYMGDIDVKRMKRSSKPEVIEINPQAKSNLIEDDGDYDILYPKEQQTDVNMADGLDDVLYPKVSTADTNNEPEKVTQLGNKSVKKKKLKINVHRPLGTRVKFDDEGHTIPPFASIAEEVGSGDVIDKDKISQRYAEMLREMQEHDKEDKLEHKRILREKKLQKKLKLKRKRNEEMDAGSENSGSESDRDQRTASKGKKRYFNSDDEEGSKDAAKDGDVLAQQEALALKLLSKMHS

SEQ ID NO: 1757 - protein, 189 aa, Nostoc punctiforme
MLQGITPKLRSPIVLFTYYNPILHRGIDKFLQEIAAAGVAGLVVPDLPLEEAAGLLEPAKEMGIDVILLVAPTSDAKRIEAIAHSSQGFIYLVSVTGVTGVRSQLESRVSDLLKQIRGVTEKPIGVGFGISDAAQARQVKEWGADAAIVGSAVVKRLAEGTPEQGLSAIAQLCQSLKAAIKTSTNTPLD

SEQ ID NO: 1758 - protein, 478 aa, Nicotiana tabacum
MSSFLVSSNNLPEREIPGDYGFPIISAIKDRYDYFYKQGEDVWFHSKAEKYNSTVVKINMAPGPFTSNDYKLVAFLDANSFVYMFDNSLIDKTDTLGGTFKPGKEYYGGYRPVAFVDTSDPNHAALKNYILTSFAKRHNLFIPLFRNSVSDHLFQNLEKQVSDQGKSDFNALLPNMTFGFIFRLLCDQTNPSDTVLGAQGPEHLRKWLFPQLIPSLSARKLPSFIEDLLFHNFLIPFGLVKSDYNKLVDAFSKNAGSMLDEAEKLGIKREEAVHNILFLVGINMFAGLNAFFPHLIRFVGEAGPTLHARLAKEIRTAIKEEGGAVTLSAINKMSLVESIVYETLRLRPPVPLQYGKAKKDFMVQSHDASYMIKKGQFLVGYQPMASRDPKIFDKPDDFIPDRFMGEGVKMLKHVLWSNGRETENPAPDNKQCAGKDLVHLLGRLMLVEFFLRYDTFTVEITPLFRAPNVAIKTLTKAT

SEQ ID NO: 1759 - protein, 473 aa, Parthenium argentatum
MDPSSKPLREIPGSYGIPFFQPIKDRLEYFYGTGGRDEYFRSRMQKYQSTVFRANMPPGPFVSSNPKVIVLLDAKSFPILFDVSKVEKKDLFTGTYMPSTKLTGAYRVLSYLDPSEPRHAQLKNLLFFMLKNSSNRVIPQFETTYTELFEGLEAELAKNGKAAFNDVGEQAAFRFLGRAYFNSNPEETKLGTSAPTLISSWVLFNLAPTLDLGLPWFLQEPLLHTFRLPAFLIKSTYNKLYDYFQSVATPVMEQAEKLGVPKDEAVHNILFAVCFNTFGGVKILFPNTLKWIGVAGENLHTQLAEEIRGAIKSYGDGNVTLEAIEQMPLTKSVVYESLRIEPPVPPQYGKAKSNFTIESHDATFEVKKGEMLFGYQPFATKDPKVFDRPEEFVPDRFVGDGEALLKYVWWSNGPETESPTVENKQCAGKDFVVLITRLFVIELFRRYDSFEIELGESPLGAAVTLTFLKRASI

SEQ ID NO: 1760 - protein, 594 aa, Methanocaldococcus jannaschii
MKREVENMPVVGKIIKIAGPVVVAEGMKGAQMYEVVKVGEEKLTGEIIQLHDDKAVIQVYEETSGIKPGEPVVGTGAPLSVELGPGMLRAMYDGIQRPLTAIEEKTGSIFIPRGVDVPALPRDIKWEFKPVVNEGDYVEEGDIIGTVDETPSIVHKILVPIGVKGKIVEIKEGKFTVEETVAVVETENGERKEITMMQKWPVRKPRPYKEKLPPEIPLITGQRVEDTFFTLAKGGTAAIPGPFGSGKTVTQHQLAKWSDADVVVYIGCGERGNEMTEVIEEFPHLEDIRTGNKLMDRTVLIANTSNMPVAAREASVYTGITIAEYFRDMGYGVLLTADSTSRWAEAMREISGRLEEMPGEEGYPAYLASRLAQFYERAGRVITLGKDNRQGFVCIVGAVSPPGGDFSEPVTSNTLRIVKVFWALDANLARRRHFPAINWLQSYSLYIDDVTEWWNTNTGPDWRQLRDEAMSLLQKEAELQEIVQLVGPDALPDRERVILEVARMLREDFLQQDAFDEVDTYCPPMKQYLMLKIIMTFYQEALKAVERGVEPAKILGVSVKQDIARMKYIPHDEFINVKSKEIMEKIKNELGSLN

SEQ ID NO: 1761 - protein, 498 aa, Spinacia oleracea
MRINPTTSDPGVSTLEKKNLGRIAQIIGPVLDVAFPPGKMPNIYNALIVKGRDTAGQPMNVTCEVQQLLGNNRVRAVAMSATDGLTRGMEVIDTGAPLSVPVGGATLGRIFNVLGEPVDNLGPVDTRTTSPIHRSAPAFTQLDTKLSIFETGIKVVDLLAPYRRGGKIGLFGGAGVGKTVLIMELINNIAKAHGGVSVFGGVGERTREGNDLYMEMKESGVINEQNIAESKVALVYGQMNEPPGARMRVGLTALTMAEYFRDVNEQDVLLFIDNIFRFVQAGSEVSALLGRMPSAVGYQPTLSTEMGSLQERITSTKEGSITSIQAVYVPADDLTDPAPATTFAHLDATTVLSRGLAAKGIYPAVDPLDSTSTMLQPRIVGEEHYEIAQRVKETLQRYKELQDIIAILGLDELSEEDRLTVARARKIERFLSQPFFVAEVFTGSPGKYVGLAETIRGFQLILSGELDSLPEQAFYLVGNIDEATAKAMNLEMESKLKK

SEQ ID NO: 1762 - protein, 208 aa, Magnolia praecocissima
NRQVTFCKRRNGLLKKAYELSVLCDAEVALIVFSSRGRLYEYANNSVRNTIDRYKKACADSSSLGCVSEANSQYYQQESSKLRQQIALLQNANRHLMGEALSSMTVKELKQLENRLEKGISRIRSKKNELLFAEIEYMQKREVDLQNDNMYLRAKITENERAQQQMGMLPAPEYDVMPGFDSRNFLQVNLMDSSHHYSHQEQTALQLG

SEQ ID NO: 1763 - protein, 487 aa, Hordeum vulgare
  unsure (1)..(487): unsure at all Xaa locations
MLPSFSPAVTAAAMAPPPPKPIPGGYGAPVLGPLRDRLDYFWFQGPEEFFRRRAAQHRSTVFRANIPPTFPFFVGINPRVIAIVDTAAFTALFDPELVDKRDCLIGPYNPSDSFTGGTRVGVYLDTEEPEHERTKAFAMDLLRRSSRVWAPEFLEGVDGMLAAIESDLAAGKEGGASFLVPLQRCIFRFLCRSVASADPAAEGLVDRYGLFILDVWLGLQLLPTQKVGAIXQPLEELLLHSFPFPSILAKPGYDLLYRFVAKHGAESVAVGVTNHGMSEKDAINNILFLLGFNAFGGFSVFLPFLILQIGKDAALRARLRDEVRAALDQHDGEVGFASVKGMPLVRSTVYEVLRMNPPVPLQFGRARRDFVLRSHGGEGFSVAGGEMLCGYQPLAMRDPEVFERPEEFVADRFVGAGGEALLRYVYWSNGPETGEPALGNKQCAAKDVVIATACMLVAELFRRYDDFECTGTAFTSLKKRPQPQPSS

SEQ ID NO: 1764 - protein, 471 aa, Halesia carolina
  unsure (1)..(471): unsure at all Xaa locations
KKNXGRIVQIIGPVLDVAFPPGKMPNIYNALVVKGRDIAGQPINVTCEVQQLLGNNRVRAVAMSATDGLTRGMEVIDTGAPLSVPVGGATLGRIFNVLGEPVDNLGPVDTRTTSPIHRSAPAFIQLDTKLSIFETGIKVVDLLAPYRRGGKIGLFGGAGVGKTVLIMELINNIAKAHGGVSVFGGVGERTREGNDLYMEMKESGVINEQNIAESKVALVYGQMNEPPGARMRVGLTALTMAEYFRDVNEQDVLLFIDNIFRFVQAGSEVSALLGRMPSAVGYQPTLSTEMGSLQERITSTKEGSITSIQAVYVPADDLTDPAPATTFAHLDATTVLSRGLAAKGIYPAVDPLDSTSTMLQPRIVGEEHYEXAQRVKQTLQRYKELQDIIAILGLDELSEEDRLTVARARKIERFLSQPFFVAEVFTGSPGKYVGLAETIRGFQLILSGELDGLPEQAFYLVGNIDEATAKA

SEQ ID NO: 1765 - protein, 300 aa, Lactococcus lactis subsp. lactis
MEILEFNDELKFDEELILVLGYFDGLHRGHQSLFTEAKKIAAVLNLKIAVFTFPEKPTLTFNKFEPEMLLKLTSDEKRADLFAENGVDYLVFKDFTSNFAHQTSTEFAESVVKRFNPKVVITGFDYTTGSDMKNLKSTEDYRVVIMPEKADEHGKISSTRIRKAVEEGDIAQANELLGYSYETRGLVVHGFARGRQLGYPTANLVIKDYVHLPAVGVYTCDVIFAGERHRGFASIGYNDTFNGTEKTVEVHIFDFNGEIYGEKLTVLWLDKIRDMIKFDGIDQLIKQMKEDEQIARDFKA

SEQ ID NO: 1766 - protein, 498 aa, Melanophylla alnifolia
  unsure (1)..(498): unsure at all Xaa locations
XXXXPTTSGSGVSTLEKKNLGRIAQIIGPVLDVAFPPGKMPNIYNALVVKGRDNVGQQINVTCEVQQLLGNNRVRAVAMSATDGLMRGMEVIDTGAPLSVPVGGATLGRIFNVLGEPVDNLGPVNTRTTSPIHRSAPAFIQLDTKLSIFETGIKVVDLLAPYRRGGKIGLFGGAGVGKTVLIMELINNIAKAHGGVSVFGGVGERTREGNDLYMEMKESGVINEQNIAESKVALVYGQMNEPPGARMRVGLTALTMAEYFRDVNEQDVLLFIDNIFRFVQAGSEVSALLGRMPSAVGYQPTLSTEMGSLQERITSTKAGSITSIQAVYVPADDLTDPAPATTFAHLDATTVLSRGLAAKGIYPAVDPLDSTSTMLQPRIVGEEHYETAQRVKQTLQRYKELQDIIAILGLDELSEEDRLTVARARKIERFLSQPFFVAEVFTGSPGKYVGLAETIRGFQLILSGELDGLPEQAFYLVGNIDEATAKAMNLEMESNLKK

SEQ ID NO: 1767 - protein, 284 aa, Azospirillum brasilense
MSALNDKSVDNGRIARRFAALKAEGRAGLVTFITAGDPDLETCRAVLHGLPAAGADLIELGLPFSDPMADGPAIQAASLRALHAGTTARKTLDLVRGFRETDADTPVILMGYYNPIHAYGVDRFLADAIEAGVDGLIVVDLPPEEDEELCIPALKAGVNFIRLATPTTDDKRLPAVLQNTSGFVYYVSIAGITGAASADNAAVGAAVERLKRHTDLPVAVGFGIKTPEQAAEVARVADAAVVGSAIVTRLAGGLDADGKARPGLAEDVLGFVRELAGGVRGAAF

SEQ ID NO: 1768 - protein, 311 aa, Oryza sativa
  unsure (1)..(311): unsure at all Xaa locations
XEIEFYKGDVSYADVGGGIMWIELLEQSLKLGLAPRSWTDYLYLTIGGTLSNAGISGQTFKHGPQISNVLQLEVVTGRGEIXTCSPTKDAELFNAVLGGLGQFGIITRARILLQEAPQKXVKWVRAFYDDFATFTKDQELLVSMPVLVDYVEGFIVLNEQSLHSSSIAFPTNVDFNPDFGTKNNPKIYYCIEFAVHDYQNKNINVEQVVEVISRQMSHIASHLYSVEVSYFDFLNRVRMEEMSLRNSGLWEVHHPWLNMFVPSAGISDFRDLLMDSISPDNFEGLILIYPLLRHKWDTNTXSVVLPDLGSX

SEQ ID NO: 1769 - protein, 1067 aa, Saccharomyces exiguus
LEDHDESEYGSIYSVSGPVIVAENMIGCAMYELVKVGHDNLVGEVIRIDGDKATIQVYEETAGATVGDPVLRTGKPLSVELGPGLMETIYDGIQRPLKTIKDISQSIYIPRGIDAPALSRDIKWNFTPGKYVVGDHISGGDIFGSIFENSLLDNHKILLPPRARGTITWIAPAGEYTVDEKVLEVEFDGVKSDYSMYHTWPVRVPRPVAEKLSADYPLLTGQRVLDALFPCVQGGTTCIPGAFGCGKTVISQSLSKYSNSDAIIYVGCFAKGTQVMMADGSDKSIEDIQLGENVMGKDGTPRTVISLPRGKETMYEVCHSSTKGTTKDTLMNYVCSGNHKIVMQTPQQIGITEHGIDGKTYTSVSYFALRDSQHGYPIVKKLTKSFEHQQHGGKEQTLITVNNFVSSLKSEPINWDVEAKHYESLGHYVKKCSYQLINPVFHQSGKLAQEIASLNYSKDKAPLLAWLIGFWVGNGAMRHSQFVVESQDIELVNRIQDIAGLLNLSATTACYYSGSKDDEAKLAKLNSSSAEGFEDDLEGNPSVKELADMDRLSESKTATLPTAFGVENIDELIISLGEGRGNGNVFAQVIGSFGIDLADKDTLVTKIAHELAGDAFEVREQFVAGLVDAAGYVRKDVYDHASEATISTESKSTVLGLVKIARSLGIKITVTSDDSDDSDEHDHAHCGHDHGSSSSYTAVMTGDALTNSMRFCAIGRNRVAAKEFMRQAVPFYFSLEKKSEDDYYGITVPDNTDKQYLLSSMALVHNCGERGNEMAEVLMEFPELFTEINGRKEPIMKRTTLVANTSNMPVAAREASIYTGITLAEYFRDQGKNVSMIADSSSRWAEALREISGRLGEMPADQGFPAYLGAKLASFYERAGKAVALGSPDRIGSVSIVAAVSPAGGDFSDPVTTATLGITQVFWGLDKKLAQRKHFPSINTSVSYSKYTNVLDKFYDQNYPEFPTLRNRMKEILSNAEELEQVVQLVGKSALSDSDKITLDVASLIKEDFLQQNGYSTYDAFCPIWKTFDMMKAFIAYHDEAQKSVANGANWSKLAEATSDVKHQVSS

SEQ ID NO: 1770 - protein, 78 aa, Glycine max
STMTPSMMPPIMMPSMIPPTMMQSMVSSMIMPNMMTVPQCYSDSISHIIQQQQLPFMFSRTLVAISPMFLQQPFVGAA

SEQ ID NO: 1771 - protein, 498 aa, Sesamum indicum
  unsure (1)..(498): unsure at all Xaa locations
XXXXXXXSGSGVSTLEKKXPGRIVQIIGPVLDVAFPPGKMPNIYNALVVKGRDTVGQPINVTCEVQQLLGNNRVRAVAMSATDGLMRGMEVIDTGAPLSVPVGGATLGRIFNVLGEPVDNLGPVDTRTTFPIHRSAPAFIQLDTKLSIFETGIKVVDLLAPYRRGGKIGLFGGAGVGKTVLIMELINNIAKAHGGVSVFGGVGERTREGNDLYMEMKESGVINEENIAESKVALVYGQMNEPPGARMRVGLTALTMAEYFRDVNEQDVLLFIDNIFRFVQAGSEVSALLGRMPSAVGYQPTLSTEMGSLQERITSTKEGSITSIQAVYVPADDLTDPAPATTFAHLDATTVLSRGLAAKGIYPAVDPLDSTSTMLQPRIVGEEHYETAQRVKQTLQRYKELQDIIAILGLDELSEEDRLTVARARKIERFLSQPFFVAEVFTGSPGKYVGLAETIRGFQLILSGELDGLPEQAFYLVGNIDEATAKAMNLEMESNLKK

SEQ ID NO: 1772 - protein, 228 aa, Hyacinthus orientalis
MGRGKIEIKRIENTTSRQVTFCKRRNGLLKKAYELSVLCDAEVALIVFSTRGRLYEYSNSNSVKTTIERYKKACTDTTNTGTVSEANSQYYQQEATKLRQQITNLQNTNRTLMGESLSTMSLRELKQLEGRLERGINKIRTKKNELLSAEIEYMQKREAEMHNDNMYLRNKIAENERAQQQMNMLPSTATEYEGIPQFDSRNFLQVSLMEPNNHHYSRQQQQTALQLG

SEQ ID NO: 1773 - protein, 405 aa, Oryza sativa
MQYHQGGSRMPPFARGGAYSRGYKQLYAPPQQQPPPQDKHEVLMEAGRLAAEYLVAKGVLPPASLQRRGVGGGGWVQLPPPPPPPPPPQGTLAFYGAQNGRRRLDDDDDASKTEAMGESELEDTGSKVGSSSNFRKDVDPPQEVEGVDKLNKINEESNPSNSEVVEQMTNGESTSNNASCIVIDEEQTKAKYLPVPSDDKVSDEKPDDSSVLNEKIEDDETLAEKAEDDKTSDERVPGHGSSLTNTQEGNKDGLACLEHTDTSTTCNQMVEPVRFQTEETQIGTDDLRGQKNIEQHYAVHESREENMLPPKVGVQQQVEEGMQIYNVDTPPQDEDLIASADKEKVAGVALLPSIKAEAVVAKEEDKFDDTNMHAQIPLHNKVVQVIDLEDDSPIEAGACDTSKAK

SEQ ID NO: 1774 - protein, 222 aa, Clostridium acetobutylicum
MSDKIVIFDMDGVIVDTEPIYRKLSDRLYESLGINLTKEDQYALAGSVSQDKWTLLKKQFNLKYPIEELMKMSSGIKYDYLANEENEIPLIEGVDKLILSLKSRGIMMCVASSSRRKNIEIILKRVGLISYFEYIVSGSDVEKGKPHPEIFLRAASMFDDNILNFTVIEDTNNGVRAAKSAKMKCVGFSNPNSGTQNISSADIIVDNFGDESISRIINLVLK

SEQ ID NO: 1775 - protein, 489 aa, Pennantia cunninghamii
GSGVSTLEKENLGRIVQIIGPVLDVAFSPGKMPNIYNALVVKGRDTGGQPINVTCEVQQLLGNNRVRAVAMSATDGLTRGMEVIDTGAPLSVPVGGATLGRIFNVLGEPVDNLGPVDTRTTSPIHRSAPAFIQLDTKLSIFETGIKVVDLLAPYRRGGKIGLFGGAGVGKTVLIMELINNIAKAHGGVSVFGGVGERTREGNDLYMEMKESGVINEQNIAESKVALVYGQMNEPPGARMRVGLTALTMAEYFRDVNEQDVLLFIDNIFRFVQAGSEVSALLGRMPSAVGYQPTLSTEMGTLQERITSTKQGSITSIQAVYVPADDLTDPAPATTFAHLDATTVLSRGLAAKGIYPAVDPLDSTSTMLQPRIVGEEHYEIAQRVKQTLQRYKELQDIIAILGLDELSEEDRLTVARARKIERFLSQPFFVAEVFTGSPGKYVGLAETIRGFQLILSGELDGLPEQAFYLVGNIDEATAKAMNLEMESNLK

SEQ ID NO: 1776 - protein, 489 aa, Dicella nucifera
  unsure (1)..(489): unsure at all Xaa locations
INPTTSGXGISALEKKNLGRIAQIIGPVLDVAFPPVKMPNIYNALVVKGRDTLGQQINVTCEVQQLLGNNRVRAVAMSATDGLMRGMEVIDTGAPLSVPVGGATLGRIFNVLGEPVDDLGPVDTRTTSPIHRSAPAFIQLDTKLSIFETGIKVVDLLAPYRRGGKIGLFGGAGVGKTVLIMELINNIAKAHGGVSVFGGVGERTREGNDLYMEMKESGVINEENIAESKVALVYGQMNEPPGARMRVGLTALTMAEYFRDVNEQDVLLFIDNIFRFVQAGSEVSALLGRMPSAVGYQPTLSTEMGSLQERITSTKEGSITSIQAVYVPADDLTDPAPATTFAHLDATTVLSRGLAAKGIYPAVDPLDSTSTMLQPQIVGEEHYETAQRVKQTLQRYKELQDIIAILGLDELSEEDRLTVARARKIERFLSQPFFVAEVFTGSPGKYVGLAETIRGFKLILSGELDSLPEQAFYLVGNIDEATAKAABLE

SEQ ID NO: 1777 - protein, 484 aa, Hermannia erodioides
  unsure (1)..(484): unsure at all Xaa locations
VSMLXKRNLGRISQIIGPVLDVAFPPGKMPNIYNALVVKGRDTLGQQINVTCEVQQLLGNNRVRAVAMSATEGLTRGMEVIDTGAPLSVPVGGATLGRIFNVLGEPVDNLGPVDTRTTSPIHKRAPAFIQLDTKLSIFETGIKVVDLLAPYRRGGKIGLFGGAGVGKTVLIMELINNIAKAHGGVSVFGGVGERTREGNDLYMEMKESGVINEQNLAESKVALVYGQMNEPPGARMRVGLTALTMAEYFRDVNEQDVLLFIDNIFRFVQAGSEVSALLGRMPSAVGYQPTLSTEMGSLQERITSTKEGSITSIQAVYVPADDLTDPAPATTFAHLDATTVLSRGLAAKGIYPAVDPLDSTSTMLQPRIVGEEHYETAQRVKQTLQRYKELQDIIAILGLDELSEEDRLTVARARKIERFLSQPFFVAEVFTGSPGKYVGLAETIRGFKLILSGELDGLPEQAFYLVGNIDEATAKATNLEMESK

SEQ ID NO: 1778 - protein, 435 aa, Nicotiana tabacum
MLINGFIYLKDWANAFAIFEDVIRDGLKPDVVLYNNIIRAFCGMGNMDRALRIVEQMKKERHRPTSRTFMPIIHAFAKAGAIRKALDVFDMMRRSGCIPTVQTYNALILGLVEKRQMDKAVEVVDEMLLAGIRPNERTYTTIMDGYASLGDTGKAFEYFSRIKDEGLELDVYTYEALLKACCKSGRIESALAVTKEMNAKNIPRNTFVYNILIDGWARRSDVWEAADLMQQMRQEGVQPDIHTYTSFVNACCKAGDMQKAMNTIQEMKRVGLNPMLKPIPLSYTVGHASLPEKALKCFEEMKKSGLKPDKAVYHCLMTSLLSRATVAEDYIITGIHRVCEEMVESGLTVDMGTAVHWSRCLRKIERTGGDITEALQKTFPPDWNSHRNLNAASYDTGNNEGLNDRVTTMVLCMRLTVTATVTMIQMPPRCNQKVA

SEQ ID NO: 1779 - protein, 852 aa, Oryza sativa; identical to SEQ ID NO: 260

SEQ ID NO: 1780 - protein, 381 aa, Triticum aestivum
  unsure (1)..(381): unsure at all Xaa locations
ILARGSNQEAGSSNGFAPYEWKRTVFSWLIDLDVLSVNTRLKCMDESRSKVLLEGLLTRDGINCSCCSKVVTVLEFVAHAGGQPSKPYRNILVDGLDNDLLHCLISAWDKQSDSERQAFFPVSTEGDDPNDDTCGICGDGGNLICCDGCPSTFHMSCLELEELPSDDWRCANCSCKFCQEHLNHDAPDNAEVDSLHSCSQCEEKYHPACSPETEDLSSVSNQAGNHFCQQSCRLLFEELQNLLAVKKDLEPEFACRIIQCSHEDAPETVLDLDGRVECNSKIAVALSLMDECFLPIVDQRTGINLIRNVVYPCGSNFLRLDXXGXYIFILERGDEIVSAASVRIHGTKLAEMPFIGTRHMYRRQGMCRRLLDGIEMILSSL

SEQ ID NO: 1781 - protein, 276 aa, Oryza sativa
  unsure (1)..(276): unsure at all Xaa locations
AAAAAAVERRMSVSQTMSKLKEKGKTAFIPYITAGDPDMGTTAEALRLLDACGADVIELGVPFSDPYADGPVIQASASRALAAGATPEAVLSMLKEVTPELSCPVVLLSYLGPILRRGAANFTAAAKEAGVQGLIVPDLPYVDTCTFRSEAIKSNLELVLLTTPATPGERMKIITEASGGFVYLVSVNGVTGPRPKVNTRVEHLLQDIKLVTDKAVCVGFGISTPDHVRQIAGWGADGVIIGSAMVRQLGEAASPKQGLKRLEEYARRMKDALPXK

SEQ ID NO: 1782 - protein, 477 aa, Brunonia australis
PTTSSSGFSTLEKKKPGRITQIIGPVLDVAFPPGKMPNIYNALVVKGLDPLGQPINVTCEVQQLLGNNRVRTVAMSATDGLTRGMGVIDTGVPLSVPVGGATLGRIFNVLGEPVDNLGPVDTSTTSPIHRSAPAFINLDTKLSIFETGIKVVDLLAPYRRGGKIGLFGGAGVGKTVLIMELINNIAKAHGGVSVFAGVGERTREGNDLYKEMKESGVINEENFAESKVALVYGQMNEPPGARMRVGLTALTMAEYFRDVNEQDVLLFIDNIFRFVQAGSEVSALLGRMPSAVGYQPTLSTEMGSLQERITSTKKGSITSIQAVYVPADDLTDPAPATTFAHLDATTVLSRGLAAKGIYPAVDPLDSTSTMLQPLIVGDEHYEIAQQVKQTLQRYKELQDIIAILGLDELSEEDRLTVARARKIERFLSQPFFVAEVFTGSPGKYVGLAETIRGFQLIHSGELDGLPEQAFYLVGNID

SEQ ID NO: 1783 - protein, 317 aa, Oryza sativa
  unsure (1)..(317): unsure at all Xaa locations
SVGLDDAARRLGVERRRIYDIVNVLESIGMLVRRAKNRYTWIGFGGVPAALAKLKVRRIRIFYILGFVNYDYKSSDDEDDDKLDDAEGDAESEKLSLSQSIDNPSDKPDAEHRKEKSLGLLTQNFVKLFLTMEVIETISLDEAAKRLLGEGHAANNMRTKVRRLYDIANVLSSLNLIEKTQQADSRKPAFRWLGQAKRNEGVTVALPPTKTLPNKRAFGTDLTNIDNKRGKLDSTMEKEASPRRMVATYSIICRGNXGQENRSDFVYGPFHPAVARKQEHGIQEKERKSIQDWENLASSFRPQYQNPGELQLSLYIY

SEQ ID NO: 1784 - protein, 487 aa, Douglasia nivalis
  unsure (1)..(487): unsure at all Xaa locations
MRITPTTSGLGAPVLEKKNLGRIIQIIGPVLDVSFPPGKMPNIYNALVVKGRDTAGQPINVTCEVQQLLGNNRVRAVAMSATDGLPRGMEVIDTGTALRVPVGGATLGRIFNVLGEPVDNLGPVDTRTTSPIHRSAPAFIQLDTKLSIFETGIKVVDLLAPYRRGGKIGLFGGAGVGKTVLIMELINNIAKAHGGVSVFGGVGERTREGNDLYMEMKESGVINEENIAESKVALVYGQMNEPPGARMRVGLTALTMAEYFRDVNEQDVLLFIDNIFRFXQAGSEVSALLGRMPSAVGYQPTLSTEMGSLQERITSTKEGSITSIQAVYVPADDLTDPAPATTFAHLDATTVLSRGLAAKGIYPAVDPLDSTSTMLQPRIVGEEHYETAQRVKETLQRYKELQDIIAILGLDELSEEDRLTVARARKIERFLSQPFFVAEVFTGSPGKYVGLAETIRGFQLILSGELDGLPEQAFYLVGNIDEATAKA

SEQ ID NO: 1785 - protein, 456 aa, Cupaniopsis anacardioides
IGPVLDVAFPPGKMPNIYNALVVRGRDTVGQPINVTCEVQQLLGNNRVRAVAMSATDGLMRGMEVIDTGAPLSVPVGGATLGRIFNVLGEPVDNLGPVDTRTTSPIHKSAPAFIQLDTKLSIFETGIKVVDLLAPYRRGGKIGLFGGAGVGKTVLIMELINNIAKAHGGVSVFGGVGERTREGNDLYMEMKESGVINEQNLAESKVALVYGQMNEPPGARMRVGLTALTMAEYFRDVNEQDVLLFIDNIFRFVQAGSEVSALLGRMPSAVGYQPTLGTEMGSLQERITSTKEGSITSIQAVYVPADDLTDPAPATTFAHLDATTVLSRGLAAKGIYPAVDPLDSTSTMLQPRIVGEEHYETAQRVKQTLQRYKELQDIIAILGLDELSEEDRLTVARARKIERFLSQPFFVAEVFTGSPGKYVGLAETIRGFKLILSGELDGLPEQAFYLVGNIDE

SEQ ID NO: 1786 - protein, 482 aa, Schoutenia glomerata
  unsure (1)..(482): unsure at all Xaa locations
EKXNLGRXXQIIGPVLDVAFPPGKMPNIYNALVVKGRDTVGQQINVTCEVQQLLGNNRVRAVAMSATDGLMRGMEVIDTGAPLSVPVGGATLGRIFNVLGEPVDNLGPVDTRTTSPIHKPAPAFIQLDTKLSIFETGIKVVDLLAPYRRGGKIGLFGGAGVGKTVLIMELINNIAKAHGGVSVFGGVGERTREGNDLYMEMKESGVINEQNLAESKVALVYGQMNEPPGARMRVGLTALTMAEYFRDVNEQDVLLFIDNIFRFVQAGSEVSALLGRMPSAVGYQPTLSTEMGSLQERITSTKEGSITSIQAVYVPADDLTDPAPATTFAHLDATTVLSRGLAAKGIYPAVDPLDSTSTMLQPRIVGEEHYETAQRVKQTLQRYKELQDIIAILGLDELSEEDRLTVARARKIERFLSQPFFVAEVFTGSPGKYVSLAETIRGFKLILSGELDGLPEQAFYLVGNIDEATAKATNLEMESKXK

SEQ ID NO: 1787 - protein, 234 aa, Hordeum vulgare subsp. vulgare
MGRGRIEIKRIENTTNRQVTFCKRRNGLLKKAYELSVLCDAEVALVVFSSRGRLYEYSNNSVKATIERYKKANSDTSNSGTVAEVNAQYYQQESSKLRQQISSLQNSNSRSLVRDSVSTMTLRDLKQLEGRLEKGIAKIRARKNELMYAEVEYMQKREMELHNDNIYLRSKVSENERGQQPMNMMASGSTSSEYDHMVAPYDSRNFLQVNMQQQQHYSQQLQPTALQLGQQYFN

SEQ ID NO: 1788 - protein, 138 aa, Ipomoea cordatotriloba
HAAELTAGFYNVAGRDGYRPIARMLARHHATLNFTCLEMRDSEQPAEAKSAPQELVQQVLSSGWKEYIDVAGENALPRYDATAYNQMLLNVRPNGVNLNGPPKLKMFGLTYLRLSDDLLQTDNFELFKKFVKKMHADL

SEQ ID NO: 1789 - protein, 1877 aa, Oryza sativa (japonica cultivar-group)
MAASTSTEVVVPAGAGAGAGAGRWRRDALAHTLGSRRLPEGVADAGERVPDAVAPGVMPFIRAADKVEQDSPRVAFLCRRYAYNKVQRMDPSSVQRGVRQFKTYMSVKLDQVCLKLDDTQVMGNDAKEIQRFYKSYCAELSRISEKRNFEEVARRYQVASALYEVLRDVTNNKVDSEVMKIAKVIEEKSVHFKNYKYNIIPLNFPGSSEAIVELHEIKGAIDALNSIDGLPMPHMSTMHTDGNKSIRDLLDWLSLAFGFQKSNVENQRENLVLLLANIGTRTAGQDHPLVDTVNKLWKKILQNYQSWCSYLHVSSSIMNVETVTQNKQQLMLLHIGLYLLIWGEASNVRFMPECLCYIFHHMARQLHKMIEENNFQSPPGFEEEGSFLKTAIEPIYKVLQKSVSFRFLPRRSEKCFARLNWPWDLTADFFYQGRTTSTKPKTNFVEVRTFLHIFRSFNRMWMFFILAFQAMLIVSWSSSGSLSALADATVFRSVLSVFITAALLNFIKVTLDIVLTFQAWGNMDWIQIVRYLLKFFVAIAWIIILPLAYSSSIRYPSGAGKLLNSWVGNWHNPSVYNVAIIIYIVPDILAAFLFLLPQLQNIMERSNWRVIGLIMWWIQPRLYVARGMHEDILSIIKYVFFWVVLLTCKLAFSFYVEISPIIGPTKFLLNQGVGNYEWHEIFPFLPHNLGVVITIWAPIVMVYFMDIQIWYAIFSTAFGGVSGALSHVGEVSDSFMYDNIFAVLKMFSCKISSFSFNVDTYPWHVKSQIQQACGEGRFFCVWNSFINSLREEDFISDRERDILMAPSFSSSFSVTPWPPFLVARIYQVPTALHMAMTSKEGDYHELIEKIRLDQARFNAVIECYESLVLILKNLLLDNNDQKIVDAIDKTVLDSVENNTLLEDFHMAEIGKVSNTLAKLLHLLSNESTDGTAERKIINALQDFMEITTRDFMKDGQGILKDENERKQRFTHLDMDMIKESFWKEKFVRLHLLLTMKDSAMDVPTNLDARRRITFFANSLFMKMPKAPQVHDMISFSVLTPYYNEEVLYSSHELNKKNEDGISILFYLQKIYPDEWKNFLERIGVDPENEEAVKGYMDDVRIWASYRGQTLARTVRGMMYYRRALELQCYEDMTNAQADLDGEESARSKAIADIKFTYVVSCQLYGMHKASKDSREKGLYENILNLMLTYPALRIAYIDEKEVPLPNGKMEKQYYSVLVKGNDEVEIYRIRLPGKPTDIGEGKPNNQNHAIIFTRGEALQAIDMNQDNYLEEAFKMRNLLEEFLIKHGKSEPTILGVREHIFTGRYSVSSLAWFMSNQETSFVTIGQRVLANTLKYVSFQVRFHYGHPDVFDRIFHLTRGGISKASKVINLSEDIFAGFNSTLRQGNVTHHEYIQLGKGRDVGMNQISNFEAKVANGNGEQTLCRDIYRLGHRFDFYRMLSLYFTTVGFYFNSMVAVLTVYVFLYGRLYLVLSGLEKSILQDPQIKNIKPFENALATQSIFQLGMLLVLPMMIEVGLEKGFGRALGEFVIMQLQLASVFFTFHLGTKTHYYGRTILHGGAKYRGTGRGFVVRHAKFAENYRMYSRSHFVKALELLILLVVYLAYGISYRSSSLYLYVTISIWFLVFCWLFAPFVFNPSCFEWHKTVDDWTDWWHWMSNRGGIGLAPEQSWEAWWISEHDHLRNGTIRSLLLEFVLSLRFLIYQYGIVYHLHIVHGNRSFMVYALSWLVIAIVLVSLKVVSMGREKFITNFQLVFRILKGIVFIVLISLVVILFVVFNLTVSDVGASILAFIPTGWFILQVSDARDVLRKIGPWDSIQEMARMYEYTMGILIFFPIAVLSWFPFVSEFQTRLLFNQAFSRGLQISRILTGQNGSGSKRD

SEQ ID NO: 1790 - protein, 414 aa, Bacteroides thetaiotaomicron VPI-5482
MADSKTKKKCSFCGRSENEVGFLITGMNGYICDSCATQAYEITQEALGEGRKRAGATKLNLKELPKPVEIKKFLDQYVIGQDDAKRFLSVSVYNHYKRLLQKDSGDDVEIEKSNIIMVGSTGTGKTLLARTIAKLLHVPFTIVDATVLTEAGYVGEDIESILTRLLQVADYNVPEAEQGIVFIDEIDKIARKGDNPSITRDVSGEGVQQGLLKLLEGSVVNVPPQGGRKHPDQKMIPVNTKNILFICGGAFDGIEKKIAQRLNTHVVGYTASQKTAVIDKNNMMQYIAPQDLKSFGLIPEIIGRLPVLTYLNPLDRNALRAILTEPKNSIIKQYIKLFEMDGIKLTFEDSVFEYIVDKAVEYKLGARGLRSIVETIMMDVMFEIPSESKKEYKVTLDYAKQQLEKANMARLQIA

SEQ ID NO: 1791 - protein, 488 aa, Cystostemon heliocharis
GSGVSMLEKNNLGRVVQIIGPVLDVAFSPGKMPNIYNALVVKGRDTVGQPINVTCEVQQLLGNNRVRAVAMSATDGLTRGMEVIDTGAALSVPVGGATLGRIFNVLGEPVDNLGPVDTRTTSPIHRSAPAFIQLDTKLSIFETGIKVVDLLAPYRRGGKIGLFGGAGVGKTVLIMELINNIAKAHGGVSVFGGVGERTREGNDLYMEMKESGVINEENIAESKVALVYGQMNEPPGARMRVGLTALTMAEYFRDVNEQDVLLFIDNIFRFVQAGSEVSALLGRMPSAVGYQPTLSTEMGTLQERITSTKAGSITSIQAVYVPADDLTDPAPATTFAHLDATTVLSRGLAAKGIYPAVDPLDSTSTMLQPRIVGEEHYETAQRVKETLQRYKELQDIIAILGLDELSEEDRLTVARARKIERFLSQPFFVAEVFTGSPGKYVGLAETIRGFQLILSGELDGLPEQAFYLVGNIDEATAKAMNLEMENNL

SEQ ID NO: 1792 - protein, 509 aa, Bifidobacterium longum NCC2705
MSRLALVDWVSANGAIAPRTKLNKNRQAFMRKAKIVDTIGPSTEDYDNLLKLVEAGMDVARLNRSHGTPEDHLKVYNNVRKASEATGRNVAALVDLQGPKIRCGWFKKNADGEDKVQLQLGQEFVITTDDVEGDEHITSTTFKGLPGDCHPGDPILIDDGKVRLEVTKVEGNNVYTKVVVAGPVSSHKGINLPGVAVSLPALTEKDEADLRWAIRTGADIIAMSFVRFATDIDRAHEIMDEEGRRIPIIAKIEKPQALENLEEIVKTFDGVMAARGDMAVECPLEEVPLATKRIIELARQYAKPVIVATEVLGSMVNSPVPTRAEASDCANAILDGSDATMTSNETAVGKYPDVTVATMARISGYATDHGFDRIPELKNLDMSSTGAVSSAAVDLADKLNAKAIVAYTQTGATVHRVSRERPAAPIYGLTSNEHTYHWLALSWGTEAFLLKEDYHDKSRKDLMVYTDKVLKDAGKVADGDKIVILSSAQGDHQPGRTDSIYVHTVGACD

SEQ ID NO: 1793 - protein, 483 aa, Nolina recurvata
  unsure (1)..(483): unsure at all Xaa locations
SGSAVXTLDEKNLGHIAQIIGPVLDVVFPPGKMPNIYNALVVKGRDTVGQQINVTCEVQQLLGNNRVRAVAMSATDGLTRGMEVIDTGAPLSVPVGGATLGRIFNVLGEPVDNLGPVDTRTTSPIHRSAPAFIQLDTKLSIFETGIKVVDLLAPYRRGGKIGLFGGAGVGKTVLIMELINNIAKAHGGVSVFGGVGERTREGNDLYMEMKESGVINEKNIAESKVALVYGQMNEPPGARMRVGLTALTMAEYFRDVNEQDVLLFIDNIFRFVQAGSEVSALLGRMPSAVGYQPTLSTEMGSLQERITSTKEGSITSIQAVYVPADDLTDPAPATTFAHLDATTVLSRGLAAKGIYPAVDPLDSTSTMLQPGIVGEEHYETAQKVKQTLQRYKELQDIIAILGVDELSEEDRLTVARARKIERFLSQPFFVAEVFTGSPGKYVGLAETVRGFQLILSGELDSLPEQAFYLVGNIDEATAKAMNL

SEQ ID NO: 1794 - protein, 508 aa, Mycoplasma pneumoniae
MIHHLKRTKIIATCGPALTKKLWTLAMLDDPAYAAMKAEAYANIENIIKNGVTVIRLNFSHGNHEEQAVRIKIVRDVAKKLNLPVSIMLDTNGPEIRVFETAPEGLKILKDSEVVINTTTKEVAKNNQFSVSDASGTYNMVNDVKVGQKILVDDGKLSLVVKRIDTKNNQVICVAQNDHTIFTKKRLNLPNADYSIPFLSAKDLRDIDFGLTHQIDYIAASFVNTTENIKQLRDYLASKNAKHVKLIAKIESNHALNNIDGIIKASDGIMVARGDLGLEIPYYKVPYWQRYMIKACRFFNKRVITATQMLDSLEKNIQPTRAEVTDVYFAVDRGNDATMLSGETANGAFPLNAVYVMKMIDKQSETFFDYQYNLNYYMANSKARHSEFWKQVVLPLAQKTAPKRKLINSDFKYDFVVHATNNLNEIYALSNARLAAAVIILTNDPQVYTGHGVDYGIFPYLIDQKPQSLSKAEFKSLANVAIKHYQQHGEISQLKQCLGVFHNKIISL

SEQ ID NO: 1795 - protein, 230 aa, Rhodobacter sphaeroides
MIEAILFDVDGTLAETEELHRRAFNETFAALGVDWFWDREEYRELLTTTGGKERIARFLRHQKGDPAPLPIADIHRAKTERFVALMAEGEIALRPGIADLIAEAKRAGIRLAVATTTSLPNVEALCRACFGHPAREIFDVIAAGDMVAEKKPSPDIYRLALRELDVPPERAVALEDSLNGLRAAKGAGLRCIVSPGFYTRHEEFAGADRLLDSFAELGGLAGLDLTAPVA

SEQ ID NO: 1796 - protein, 498 aa, Scrophularia californica
  unsure (1)..(498): unsure at all Xaa locations
XXXXXXXXGXGVSTLEKKNLGRIVQIIGPVLDVAFPPGKMPNIYNALVVKGRDTAGQPINVTCEVQXLLGNNRVRAVAMSATDGLTRGMEVIDTGAPLSVPVGGATLGRIFNVLGEPVDNLGPVDTSTTFPIHRSAPAFIQLDTKLSIFETGIKVVDLLAPYRRGGKIGLFGGAGVGKTVLIMELINNIAKAHGGVSVFGGVGERTREGNDLYMEMKESGVINQENIAESKVALVYGQMNEPPGARMRVGLTALTMAEYFRDVNEQDVLLFIDNIFRFVQAGSEVSALLGRMPSAVGYQPTLSTEMGSLQERITSTKEGSITSIQAVYVPADDLTDPAPATTFAHLDATTVLSRGLAAKGIYPAVDPLDSTSTMLQPRIVGEEHYETAQRVKQTLQRYKELQDIIAILGLDELSEEDRLTVARARKIERFLSQPFFVAEVFTGSPGKYVGLAETIRGFQLILSGELDGLPEQAFYLVGNIDEATAKAMNLEMESNLKK

SEQ ID NO: 1797 - protein, 377 aa, Glycine max
MSVAKKLIRCVILDLDGTLLNTDGIVGNVLKVMLGKYGKEWDGREAQKIIGTTPFEAAAAVVQDYQLPCSAIEFLSEISPLFSDQWCNIKALPGANRLVKHLKSHGVPMALASNSPRESIEAKISYHDGWKNSFSVIIGGDEVRTGKPSPEIFLEAARRLNMEPSSCLVIEDSLPGVTAGKTAEMEVVVVPSLPKQSHLYTAADEVINSLLDLRLEKWGLPPFEDWVEGTLPVDPWYIGGPVVKGFGRGSKVLGIPTANLSTEGYSDLLSEYPAGVYFGWAGLSARSVFKMVMSIGWNPYFNNKEKAIEPWLLHDFNEDFYGEELRLVIVGYIRPEVNFSSLESLVAKIHEDRRVAERALDLPLYSSFKNDSYLRSS

SEQ ID NO: 1798 - protein, 571 aa, Glycine max
MLEKVEEFNMDKVIQEFELLTRDAERVQRETLKRILEDNASAEYLQSLGLNGRTDPESFKACVPMVTHKELEPYIYRIIDGDASPILTGKPITTMSLSSGTTQGKPKYVPWNDELYETTMQIYQTSFAFRNREFPIKNGKALSFIYGSKQLKTKGGLAARTATSNVFCSAGYKCAMRALQSQCCSPDEVIFGPDFFQSLYCHLLCGLIFREEVEFVSSTFAHSIVHAFRTFEQVWEELCNDIREGVLTRNVTVPSIRMAMSKLLKPNPELANAIHKKCTGLSNWYGLIPELFPNAKYIYGIMTGSMEPYLKKMRHYAGELPLLTADYGSSEGWIAANVNPQLPPEYATYAVLPHIGYFEFIPLLELENTKPLGLTQVKVGQEYEIVMTNPAGLYRYRLGDVVKVMGFHNSTPELKFIRRSSLLLNINIDKNTEKDLQLAVEAAGKLLAEEKLEVVDFSSQVDLSKEPGHYVIFWEISGDASQELLHECCNCLDKSFVDAGYTSSRKVNCIGALELRLVRRGTFQKILDHYLGLGTAVSQYKTPRCVGPTNTRVLQILSENVVNNYLSTAFN

SEQ ID NO: 1799 - protein, 591 aa, Arabidopsis thaliana
METVEAGHDDVIGWFEHVSENACKVQSETLRRILELNSGVEYLRKWLGTVDVEKMDDYTLETLFTSLVPIVSHADLDPYIQRIADGETSPLLTQEPITVLSLSSGTTEGRQKYVPFTRHSAQTTLQIFRLSAAYRSRFYPIREGGRILEFIYAGKEFKTLGGLTVGTATTHYYASEEFKTKQETTKSFTCSPQEVISGGDFGQCTYCHLLLGLHYSSQVEFVASAFSYTIVQAFSFFEEIWREICADIKEGNLSSRITLPKMRKAVLALIRPNPSLASHIEEICLELETNLGWFGLISKLWPNAKFISSIMTGSMLPYLNKLRHYAGGLPLVSADYGSTESWIGVNVDPHLPPEDVSFAVIPTFSYFEFIPLYRRQNQSDICIDGDFVEDKPVPLSQVKLGQEYELVLTTFTGLYRYRLGDVVEVTSFHKGTPKLSFIYRRKLILTINIDKNTEKDLQRVVDKASQLLSRSTRAEVVDFTSHADVIARPGHYVIYWEIRGEADDKALEECCREMDTAFVDYGYVVSRRMNSIGPLELRVVERGTFGKVAERCVGKCGGLNQFKTPRCTTNSVMLDILNDSTIKRFRSSAYD

SEQ ID NO: 1800 - protein, 271 aa, Oryza sativa; identical to SEQ ID NO: 1297

SEQ ID NO: 1801 - protein, 271 aa, Mycobacterium intracellulare
MTVKQSEASRLGPIFDVCRDDGRAALIGYLPTGYPDVTTSVHAMVALVESGCDIVEVGVPYSDPGMDGPTIVKATEAALHGGVRVRDTLAAVEAISAAGGHAVVMTYWNPVLRYGIDAFARDLASAGGYGLITPDLIPDEAGQWLAASEEHRLDRIFLVAPSSTPQRLAMTVEASRGFVYAASTMGVTGARDVVSNAAPELVGRVKEISDIPVGVGLGVRSGEQAAQIGGYADGVIVGSALVSALGDGGLTALRALTEELAAGVRQRAAAS

SEQ ID NO: 1802 - protein, 263 aa, Methanosarcina barkeri
MERQKISEKFSELREKKEGALICYVMAGDPSAEKTGEIVKALVNGGADIIELGFPFSDPVADGPTIQVAGQRSLAAGMDTQRYFELIKNLDVGIPLVCMTYYNPVFRYGVEKFVEKAADAGISGLIVPDIPVEEAADLKNSCEKHGLDLIFLIAPTTTEGRVQKILERGSGFLYLVSRLGVTGAREDVSSSTRELLSRVETGLPKAVGFGISTGEQAAEVRDAGADAVIVGSAFVKIIDEGKDVNERLEALAKELKSGIKRAS

SEQ ID NO: 1803 - protein, 613 aa, Acetabularia acetabulum
MSKAKEGDYGSIKKVSGPVVVADNMGGSAMYELVRVGTGELIGEIIRLEGDTATIQVYEETSGLTVGDGVLRTKQPLSVDLGPGILGNIFDGIQRPLKAIADVSGDVFIPRGVNVPSLDQTKQWEFRPSAFKVGDRVTGGDIIGIVPENSLLDHKVMLLPQAKGTVTYIAAPGNYTINEKIIEVEFQGAKYEYSMKQSWPVRSPRPVVEKLLADTPLLTGQRVLDSLFPGVRGGTCAIPGAFGCGKTVISQALSKYSNSDGIVYVGCGERGNEMAEVLMDFPQLTMTMPDGREESIMKRTTLVANTSNMPVAAREASIYTGITLSEYFRDMGYNFAMMADSTSRWAEALREISGRLAEMPADSGYPAYLGARLASFYERSGRVACIGSPEREGSVTIVGAVSPPGGDFSDPVTSATLGIVQVFWGLDKKLAQRKHFPSVNWLISYSKYLNALEPFYEKFDSDFVTLRQVAREVLQKEDELNEIVQLVGKDALAESDKIILETARFLKEDYLQQNSFTKYDKYCPFYKSVGMMRNIVTFHRLATQAIERTAAGNVDGQKITFNIIKAKLGDLLYKVSSQKFEDPSDGEGVVTAHLNELNEELKEKFRALEDEYR

SEQ ID NO: 1804 - protein, 204 aa, Halobacterium sp. NRC-1
MTPDAYLDLVARIDADVPVVCMTYYNLLFQYGDRAGPAAFVSAAAEAGVSGFVVPDLPVDESGPLREACRAHGLDLVFVVAPTTTADRRERMLDLTTGFVYVQGRVGTTGAREEVSAATPDALAALQHTDIPKAVGFGVSSGEQAREITASGADGVIVGSAYVDTVADGVADDDPPSVVADRLRDLAAELKAGAARGVPEPEHK

SEQ ID NO: 1805 - protein, 318 aa, Bacillus anthracis str. Ames
MEQSMRKKNNNQINIVLNHRKKISLPAAENKTVISSETTTKHEMLQRIEEEMGKLVGMDDIKKIIKEIYAWIYVNKKRQEIGLKSEKQVLHMLFKGNPGTGKTTVARMIGKLLFEMNILSKGHLVEAERADLVGEYIGHTAQKTRDLIKKAMGGILFIDEAYSLARGGEKDFGKEAIDTLVKHMEDKQHGFVLILAGYSREMNHFLSLNPGLQSRFPFIIEFADYSVNQLLEIGKRMYEEREYQLSKEAEWKFRDHLHAVKYSSQITSFSNGRYVRNIVEKSIRTQAMRLLQEDAYDKYDLVGISSSDLMLEEETHST

SEQ ID NO: 1806 - protein, 82 aa, Brassica rapa
PKELRNLEGRLDRSVNRIRSKKNELLFAEIDYMQKREVDLHNDNQLLRAKIAENERNNPSMSLMPGGSNYEQIMPPPQTQPQ

SEQ ID NO: 1807 - protein, 575 aa, Arabidopsis thaliana
MLEKVETFDMNRVIDEFDEMTRNAHQVQKQTLKEILLKNQSAIYLQNCGLNGNATDPEEAFKSMVPLVTDVELEPYIKRMVDGDTSPILTGHPVPAISLSSGTSQGRPKFIPFTDELMENTLQLFRTAFAFRNRDFPIDDNGKALQFIFSSKQYISTGGVPVGTATTNVYRNPNFKAGMKSITSPSCSPDEVIFSPDVHQALYCHLLSGILFRDQVQYVFAVFAHGLVHAFRTFEQVWEEIVTDIKDGVLSNRITVPSVRTAMSKLLTPNPELAETIRTKCMSLSNWYGLIPALFPNAKYVYGIMTGSMEPYVPKLRHYAGDLPLVSHDYGSSEGWIAANVTPRLSPEEATFAVIPNLGYFEFLPVSETGEGEEKPVGLTQVKIGEEYEVVITNYAGLYRYRLGDVVKVIGFYNNTPQLKFICRRNLILSINIDKNTERDLQLSVESAAKRLSEEKIEVIDFSSYIDVSTDPGHYAIFWEISGETNEDVLQDCCNCLDRAFIDAGYVSSRKCKTIGALELRVVAKGTFRKIQEHFLGLGSSAGQFKMPRCVKPSNAKVLQILCENVVSSYFSTAF

SEQ ID NO: 1808 - protein, 255 aa, Chloroflexus aurantiacus
MVIWNEHKPALSISTRLTKLIARKADNPSITRDVSGEGVQQALLKILEGGVAHVPPLPGRKHPQQEYIPFDTTNVLFICGGAFEGITKIIAKRLRGKQLIGFGSNPVNPVEEEGALLAQITPDDLMHFGFIPEFVGRLPVIVALEPLSREAMLRILTEPRNAIIKQYQKLFALDHCELEFTPDSLEAIVDRAMAARTGARALRSIVEEVLLDVMFELPSQEHIGRCIVTAEVIQGRGRPILVPRADYRRRLDEAV

SEQ ID NO: 1809 - protein, 270 aa, Mycobacterium tuberculosis H37Rv
MVAVEQSEASRLGPVFDSCRANNRAALIGYLPTGYPDVPASVAAMTALVESGCDIIEVGVPYSDPGMDGPTIARATEAALRGGVRVRDTLAAVEAISIAGGRAVVMTYWNPVLRYGVDAFARDLAAAGGLGLITPDLIPDEAQQWLAASEEHRLDRIFLVAPSSTPERLAATVEASRGFVYAASTMGVTGARDAVSQAAPELVGRVKAVSDIPVGVGLGVRSRAQAAQIAQYADGVIVGSALVTALTEGLPRLRALTGELAAGVRLGMSA

SEQ ID NO: 1810 - protein, 428 aa, Buchnera aphidicola str. Bp (Baizongia pistaciae)
MVDNSKNNTETLLCCSFCEKNQKEVKKLIAGLSAYICDECIKLCNNILEEENNNLSSYYDVKKKIPTPYEIFKHLDNYIIGQLHTKKVLSVAVYNHYKRLNHLNSKKNNNIELGKSNLLLIGPTGCGKTLLAETLAKFLDVPFSISDATTLTEAGYVGEDVENIIQRLLQKCNYNIKKAETGIIYIDEIDKISRKSENPSITRDVSGEGVQQALLKLIEGTLASVPMQGGRKHPQQEFLKVDTSKILFICGGAFLGLNKIIEKRTKLGTKIGFNAKVNKNLKICSKDALMQQVIPEDLIKFGLIPEFIGRLPILTILHELDKKMLVKILSEPKNALIKQYQTLFKLEDVELKICTKVIEYIAQKAMNQNTGARGLRSIIEMLLLDTMYRLPSMTNIKTIIIDESTIVNNNLTPILIYKKHDSKTTSGK

SEQ ID NO: 1811 - protein, 820 aa, Oryza sativa
TAMSRGGGGCCPSMDLMRSEAMQLVQVIIPAESAHLAVSYLGDLGLLQFKDLNADKSPFQRTYASQIKRCGEMARKLRFFREQMSKAAIATSTQFSGTSLEIDDLEVKLGELEVELTEVNANNDKLQRTYNELVEYNIVLQKAGEFFYSAQRSATEQQREMSADQSGDSSLESPLLQQEMVTDPSKQVKLGSLSGLVPKEKAMAFERILFRATRGNMFLRQEPVDETVTDPLSGEKVIKNAFVIFYSGERAKSKIVKICDAFGANRYPFPEDLGKQLQTIQEVSGKISELKATIEIGLAHRDSILKNISSEFEQWNTLVKKEKAIYHTLNMLSLDVTKKCLVAEGWSPVFATSQIQDALQRATVDSKSQVGSIFQVLNTQESPPTFFQTNKFTSAFQEIVDAYGIAKYQEANPGVFTIVTFPFLFAIMFGDWGHGICLLLATLYLIIREKKLASQKLDDIMDMMFGGRYVILMMSLFSIYTGLIYNEFFSVPFELFGKSAYACRDPSCGDATTEGLIKVRPAYSFGVDPVWHGSRSELPFLNSLKMKLSILIGVAQMNLGIMMSYFNAKFFRNAINVWYQFIPQLIFLNSLFGYLSLLIIIKWCTGSKADLYHVMIYMFLSPTDDLGENELFPGQKLVQLVLLLLALVSVPWMLIPKPFFLKKQHEQRHQGQQYTMLQATDESVTVEEHQDDPHHHEEFEFSEVFVHQLIHTIEFVLGAVSNTASYLRLWALSLAHSELSTVFYEKVLVLSWGYNNIFILIIGAVIFLFATIGVLLVMETLSAFLHALRLHWVEFQNKFYEGDGYKFVPFAFASIIEEED

SEQ ID NO: 1812 - protein, 793 aa, Oryza sativa
  unsure (1)..(793): unsure at all Xaa locations
IPAALNLYXFLTKSASKNDLSSKKKFPNLYLLIVSKFMRDXSETVRGMMYYRKALVLEAFLDMAKHEDLMEGYKAVESTDEQWKLQRSLFAQCEAVADMKFTYVVSCQQYGNDKRAALPNAQDILQLMRTYPSLRVAYIDQVEDRVEEKKMEPAYYSTLVKVALTKDSESTDPVQNLDQVIYRIKLPGPAMLGEGKPENQNHAIIFTRGEGLQTIDMNQDNYMEEALKMRNLLQEFLTEHGVRRPSILGVREHIFTGSVSSLAWFMSNQEHSFVTIGQRLLANPLKVRFHYGHPDVFDRIFHLTRGGVSKASRSINLSEDIFAGYNSTLRGGNITHHEYVQVGKGRDVGLNQISKFEAKVANGNGEQTLSRDIYRLGHRFDFFRMLSCYFTTVGFYFSTLLTVVTVYVFLYGRLYLALSGLEEGLLTQRRYIHNHPLQVALASQSLVQLGFLMALPMMMEIGLEKGFGQALSEFIMMNLQLAAVFFTFSLGTKTHYYGRMLLHGGAQYRATGRGFVVFHAKFAENYRLYSRSHFVKGIELLILLIIYQLFGQSYRSTIAYIFVTFSMWFLVLTWLFAPFLFNPSGFEWTKIVDDWSDWNKWISNRGGIGVSPDKSWESWWEIELEHLKYSGTIGLFNFVARDFGGIACYEDCICRKAEIXCGFSAIFPSDXVYDICFVHRHLDCTDSNTSYDLTRYICVLSGILTFRMGNIAACKPLARRAGLWGSVRALARAYEIIMGVLLFTPITILAWFPFVSEFQTRMLFNQAFSRGLQISRILGGQKKERERSSRNKD

SEQ ID NO: 1813 - protein, 225 aa, Vitis vinifera
MGRGKIEIKRIENTTNRQVTFCKRRNGLLKKAYELSVLCDAEVALIVFSSRGRLYEYANNSVRTTIERYKKVCSDSSNTGSVSEANAQFYQQEASKLRRQIRDIQNLNRHILGEALSSLNFKELKNLETRLEKGISRIRSKKNELLFAEIEYMQKREIELQNSNLFLRAQIAENERAQQQMNLMPGSQYESVPQQPYDSQNLLPVNLLDPNHHYSRHDQTALQLV

SEQ ID NO: 1814 - protein, 280 aa, Oryza sativa
  unsure (1)..(280): unsure at all Xaa locations
XNHLADCVVSQVLKPFLVKNGKKWDSKKAHKLVGKTPYEAAAVVLEDYGLPYSTEEFLSMLTPMFNEQWCNIKALPGANRLIKHLKSNGVPAALASNSPRSNIDAKISCHQGIDDTLPIEPWFIGGPVIKGFGRGSKVLGIPTANLPAENFSDVLSEHTSGVYFGWAGLSTRGIFKMVMSIGWNPYFDNTEKTIEPWLLHDFGEDFYGEELRLVIVGYIRPEANFPSLESLIERIHEDARISDKALNLPLYAKYKDSPYLRNSLKEDNSANGNQSVIDSK

SEQ ID NO: 1815 - protein, 495 aa, Titanotrichum oldhamii
  unsure (1)..(495): unsure at all Xaa locations
XXXXXXXXXXXXXXLEKXNLGRIVQIIGPVLDVAFPPGKMPNIYNALVVKGRDTVGXPINVTCEVQPLLGNNRVRAVAMSATDGLMRGMEVIDTGAPLSVPVGGATLGRIFNVLGEPVDNLGPVDTRTTFPIHRSAPAFIQLDTKLSIFETGIKVVDLLAPYRRGGKIGLFGGAGVGKTVLIMELINNIAKAHGGVSVFGGVGERTREGNDLYMEMKESGVINEENIAESKVALVYGQMNEPPGARMRVGLTALTMAEYFRDVNEQDVLLFIDNIFRFVQAGSEVSALLGRMPSAVGYQPTLSTEMGSLQERITSTKEGSITSIQAVYVPADDLTDPAPATTFAHLDATTVLSRGLAAKGIYPAVDPLDSTSTMLQPRIVGEEHYETAQRVKQTLQRYKELQDIIAILGLDELSEEDRLTVARARKIERFLSQPFFVAEVFTGSPGKYVGLAETIRGFQLILSGELDGLPEQAFYLVGNIDEATTKAMNLEMESN

SEQ ID NO: 1816 - protein, 265 aa, Cytophaga hutchinsonii
METTTKVSNRLTALFQNKSNNLLNIYFTAGYPTLHDTVTVLKALEKAGVDMVEIGMPYSDPVADGPVIQQSSLDAINNGMTIKTLLQQLKDIRKEVTIPILLMGYFNTVMQYGVEKFMKEISEIGIDGVILPDLPLDEYIEHYQSICESNNISNVSLITPNTSDERLLVIDNITQGFIYMVSTNSTTGNDAKKTEDNHDAYFSRIKNMGLKSPRMIGFNIKDHKTFTDACTYANGAIIGSAFVRLLAQSKHLERDILTFVSEIRK

SEQ ID NO: 1817 - protein, 222 aa, Nostoc sp. PCC 7120
MLADIRAAIFDMDGLLFDTESIARWAWQQALASHGYIMSDNFYSEFVGRDLSWREKILKQRYGNDFPFDAIKRHRIEIGDRRELQEGLPMKVGALNLLCQLNSLGIIIALGTGTSRSRTIRRLSNAGILPYFTTIVTSEDVPQGKPAPDIYLEVSRRIHVAPVQCVVFEDSCVGVEAAFSAGMYPIMVPDIEQPSPEIRCLTYKILDSLEQASEFLEQRLEA

SEQ ID NO: 1818 - protein, 487 aa, Aniseia cernua
NPTTSSSEVSAVEKKNLGRIVKIIGPVLDVAFPSGKMPYIYNALVVQGRDNEQTNVTCEVQQLLGNNRVRAVAMSDTDGLMRGMEVIDTGAPISVPVGGSTLGRIFNVLGEPVDNLGPVDTNTTSPIHRSAPAFIQLDTKLAIFETGIKVVDLLAPYRRGGKIGLFGGAGVGKTVLIMELINNIAKAHGGVSVFGGVGERTREGNDLYLEMKESGVINEENIAESKVALVYGQMNEPPGARMRVGLTALTMAEYFRDVNEQDVLLFIDNIFRFVQAGSEVSALLGRMPSAVGYQPTLSTEMGSLQERITSTKEGSITSIQAVYVPADDLTDPAPATTFAHLDATTVLSRGLAAKGIYPAVDPLDSTSTMLQPRIVGEEHYETAQRVKQTLQRYKELQDIIAILGLDELSEEDRLTVARARKIERFLSQPFFVAEVFTGSPGKYVGLAETIRGFQLILSGELDGLPEQAFYLVGNIDEATAKAMNLKT

SEQ ID NO: 1819 - protein, 478 aa, Mesorhizobium loti
MRRSRKVKILATIGPASSSEEMLQKLFEAGADVFRINMSHTDHELMRTLVGRIRAVEEKVGRPIGILADLQGPKLRVGKFANGKEVLTPGQTFTLDDNPEPGTSSRVYLPHPEILSSVEPGHRLLIDDGKLELKAVKSDGKSIVCTVVAGTTISDKKGVSLPDTDLPVGALTEKDRKDLDAVLATGVDWIALSFVQRPEDLAEARKIARGRALIMAKIEKPQAVARLAEIIELSDALMVARGDLGVEMPLEAVPGIQKQITRAARRAGKPVVVATQMLESMITAPVPTRAEVSDVSIAVFEGADAIMLSAESAAGAYPVEAVAMMDRIATKVETDPTYAGIINAQRSEPEATGADAISLAAREIAETLKLSAIITYTASGTTGLRAARERPQVPIIALSPILNTARRLSLLWGTHCVVSPDATDLDDMVNRACRIALEEEFGKPGDRVIITAGVPLRTPGSTNMLRIAYVGSEKQGSR

SEQ ID NO: 1820 - protein, 443 aa, Trema micrantha
  unsure (1)..(443): unsure at all Xaa locations
YNALVVKGRDTVGQQINVTCEVQQLLGNNRVRAVAMSATDGLMRGMEVIDTGVPLSVPVGGATLGRIFNVLGEPVDNLGPVDTRTTSPIHRSAPAFIQLDTKLSIFETGIKVVDLLAPYRRGGKIGLFGGAGVGKTVLIMELINNIAKAHGGVSVFGGVGERTREGNDLYMEMKESGVINEQNIAESKVALVYGQMNEPPGARMRVGLTALTMAEYFRDVNEQDVLLFIDNIFRFVQAGSEVSALLGRMPSAVGYQPTLSTEMGSLQERITSTKXGSITSIQAVYVPADDLTDPAPATTFAHLDATTVLSRGLAAKGIYPAVDPLDSTSTMLQPRIVXEEHYETAQRVKQTLQRYKELQDIIAILGLDELSEEDRLTVARARKIERFLSQPFFVAEVFTGSPGKYVGLAETIKGFKLILSGELDSLPEQXFXLVGNXXEXTAK

SEQ ID NO: 1821 - protein, 242 aa, Shigella flexneri
LKERKEGAFVPFVTLGDPGIEQSLKIIDTLIEAGADALELGIPFSDPLADGPTIQNATLRAFAAGVTPAQCFEMLALIRQKHPTIPIGLLMYANLVFNKGIDEFYAQCEKVGVDSVLVADVPVEESAPFRQAALRHNVAPIFICPPNADDDLLRQIASYGRGYTYLLSRAGVTGAENRAALPLNHLVAKLKEYNAAPPLQGFGISAPDQVKAAIDAGAAGAISGSAIVKIIEQHIYEPEKML

SEQ ID NO: 1822 - protein, 249 aa, Campylobacter jejuni subsp. jejuni NCTC 11168
MVDFRKFYKENANVAYTVLGYPNLQTSEAFLQRLDQSPIDILELGVAYSDPIADGEIIADAAKIALDQGVDIHSVFELLARIKTKKALVFMVYYNLIFSYGLEKFVKKAKSLGICALIVPELSFEESDDLIKECERYNIALITLVSVTTPKERVKKLVKHAKGFIYLLASIGITGTKSVEEAILQDKVKEIRSFTNLPIFVGFGIQNNQDVKRMRKVADGVIVGTSIVKCFKQGNLDIIMKDIEEIFKK

SEQ ID NO: 1823 - protein, 471 aa, Rourea minor
  unsure (1)..(471): unsure at all Xaa locations
XXPXXSGSGVSXLEKKNLXRXVQIXGPVLDVAFPXGKMPNIYNALVVKGRDTVGQQINVTCEVQQLLGNNRVRAVAMSATDGLMRGMEVIDTGAPXSVPVGGATLGRIFNVLGEPIDNLGPVDTRTTSPIHRSAPAFXXLDTKLSIFETGIKVVDLLAPYRRGGKIGLFGGAGVGKTVLIMELINNIAKAHGGVSVFGGVGERTREGNDLYMEMKESGVINEENIAESKVALVYGQMNEPPGARMXVGLTALTMAEYFRDVNEQDVLLFIDNIFRFVQAGSEVSALLGRMPSAVGYQPTLSTEMGSLQERITSTKEGSITSIQAVYVPADDLTDPAPATTFAHLDATTVLSRGLAAKGIYPAVDPLDSTSTMLQPRIVGEEHYETAQRVKQTLQRYKELQDIIAILGLDELSEEDRLTVARARKIERFLSQPFFVAEVFTGSPGKYVGLAETIRGFXXILSGELDGLPEQA

SEQ ID NO: 1824 - protein, 415 aa, Treponema pallidum
MLRSKGDLVLGCSFCGKKEDERRRIVTGHGVSICNYCVERCAEYLRDRKPSALALMTKEEIPTPLELKAYLDQYVIGQDLAKRVLSVAVYNHYKRVAGRSLDIDSVLIEKSNVLLIGPTGSGKTLLAKTLSQKMKVPFAIADATTLTEAGYVGEDVENILLKLVQNANGDVALAERGIIFIDEIDKISRKSENVSITRDVSGEGVQQALLKIIEGTIASVPPQGGRKHPNQDMLRVDTSNILFICGGAFVGLDGIVGTRVCKNPVGFGADVKTVKERGLQLMHEDVIPDDLVKFGLIPEIIGRLPVTVALDALSKEDLRNILVRPRNAIVRQFEALFALDDVRLVFDEDALDAIAQQAIDQKTGARGLRSIVERLMLDAMFEAPSLKGKKELCITKKVVTQEEKASVRLVSERTA

SEQ ID NO: 1825 - protein, 477 aa, Fouquieria columnaris
LEKKKLGRIVQIIGPVLDVAFPPGKMPNIYNALVVKGRNTVGQPINVTCEVQQLLGNNRVRAVAMSATDGLTRGMEVSDTGAPLSVPVGGATLGQIFNVLGEPVDNLGPVDTRTTSPIHKSAPAFIQLDTKLSIFETGIKVVDLLAPYRRGGKIGLFGGAGVGKTVLIMELINNIAKAHGGVSVFGGVGERTREGNDLYMEMKESGVINEQNIAESKVALVYGQMNEPPGARMRVGLTALTMAEYFRDVNEQDVLLFIDNIFRFVQAGSEVSALLGRMPSAVGYQPTLSTEMGSLQERITSTKEGSITSIQAVYVPADDLTDPAPATTFAHLDATTVLSRGLAAKGIYPAVDPLDSTSTMLQPRIVGEEHYETAQRVKQTLQRYKELQDIIAILGLDELSEEDRLTVARARKIERFLSQPFFVAEVFTGSPGKYVGLAETIRGFQLILSGELDGLPEQAFYLVGNIDEATAKAMNLE

SEQ ID NO: 1826 - protein, 487 aa, Deutzia rubens
  unsure (1)..(487): unsure at all Xaa locations
XALGXSPLEKKNLXRIAQIIGPVLDVAFPPGKMPNIYNALVVKSQDTASQPINVTCEVQQLLGNNRVRAVAMSATDGLTRGMEVIDTGAPLSVPVGGATLGRIFNVLGEPVDNLGPVDTRITSPIHRCAPAFIQLDTKLSIFETGIKVVDLLAPYRRGGKIGLFGGAGVGKTVLIMELINNIAKAHGGVSVFGGVGERTREGNDLYMEMKESGVINEQNIAESKVALVYGQMNEPPGARMRVGLTALTMAEYFRDVNEQDVLLFIDNIFRFVQAGSEVSALLGRMPSAVGYQPTLSTEMGSLQERITSTKEGSITSIQAVYVPADDLTDPAPATTFAHLDATTVLSRGLAAKGIYPAVDPLDSTSTMLQPRIVGEEHYETAQRVKETLQRYKELQDIIAILGLDELSEEDRLTVARARKIERFLSQPFFVAEVFTGSPGKYVGLVETIRGFQLILSGELDSLPEQAFYLVGNIDEATAKAMNLEMES

SEQ ID NO: 1827 - protein, 471 aa, Ruizia cordata
SQIIGPVLDVAFPPGKMPNIYNALVVKGRDTVGQQINVTCEVQQLLGNNRVRAVAMSATDGLTRGMEVIDTGAPLSVPVGGATLGRIFNVLGEPVDNLGPVDTRTTSPIHKPAPAFIQLDTKLSIFETGIKVVDLLAPYRRGGKIGLFGGAGVGKTVLIMELINNIAKAHGGVSVFGGVGERTREGNDLYMEMKESGVINEQNLAESKVALVYGQMNEPPGARMRVGLTALAMAEYFRDVNEQDVLLFIDNIFRFVQAGSEVSALLGRMPSAVGYQPTLSTEMGTLQERITSTKEGSITSIQAVYVPADDLTDPAPATTFAHLDATTVLSRGLAAKGIYPAVDPLDSTSTMLQPRIVGEEHYETAQRVKQTLQRYKELQDIIAILGLDELSEEDRLTVARARKIERFLSQPFFVAEVFTGSPGKYVGLAETIRGFKLILSGELDGLPEQAFYLVGNIDEATAKATNLEMES

SEQ ID NO: 1828 - protein, 491 aa, Gilia capitata
  unsure (1)..(491): unsure at all Xaa locations
XXXXPTTSGPGXSMLEKKNQGRIIQIIGPVLDVAFPPGKMPNIYNALVVKGRDTVGQPINVTCEVQQLLGNNRVRAVAMSATDGLTRGMEVIDTGAALSVPVGGATLGRIFNVLGEPVDNLGPVDTRTTSPIHKSAPAFIQLDTKLSIFETGIKVVDLLAPYRRGGKIGLFGGAGVGKTVLIMELINNIAKAHGGVSVFGGVGERTREGNDLYMEMKESGVINEQNIAESKVALVYGQMNEPPGARMRVGLTALTMAEYFRDVNEQDVLLFIDNIFRFVQAGSEVSALLGRMPSAVGYQPTLSTEMGSLQERITSTKEGSITSIQAVYVPADDLTDPAPATTFAHLDATTVLSRGLAAKGIYPAVDPLDSTSTMLQPRIVGEEHYETAQRVKETLQRYKELQDIIAILGLDELSEEDRLTVARARKIERFLSQPFFVAEVFTGSPGKYVGLAETIRGFQLILSGELDSLPEQAFYLVGNIDEATTKAMTLE

SEQ ID NO: 1829 - protein, 489 aa, Desfontainia spinosa
  unsure (1)..(489): unsure at all Xaa locations
GSGVSTLEKKNLGRIIQIIGPVLDVAFPPGKMPNIYNALVVKGRDTVGQPINVTCEVQQLLGNNRVRAVAMSATDGLTRGMDVIDTGAPLSVPVGGATLGRIFNVLGEPVDNLGPVDTRTTSPIHRSAPAFIQLDTKLSIFETGIKVVDLLAPYRRGGKIGLFGGAGVGKTVLIMELINNIAKAHGGVSVFXGVGERTREGNDLYMEMKESGVINEQNIAESKVALVYGQMNEPPGARMRVGLTALTMAEYFRDVNEQDVLLFIDNIFRFVQAGSEVSALLGRMPSAVGYQPTLSTEMGTLQERITSTKEGSITSIQAVYVPADDLTDPAPATTFAHLDATTVLSRGLAAKGIYPAVDPLDSTSTMLQPRIVGEEHYEIAQRVKQTLQRYKELQDIIAILGLDELSEEDRLTVARARKIERFLSQPFFVAEVFTGSPGKYVGLAETIRGFQLILSGELDGLPEQAFYLVGNIDEATAKAMNLEMESNLK

SEQ ID NO: 1830 - protein, 249 aa, Brassica napus
MDEGGSSHDAESSKKIGRGKIEIKRIENTTNRQVTFCKRRNGLLKKAYELSVLCDAEVALVIFSTRGLLYEYASNSVKGTIERYKKACSDAVNPPTVTEANTKHYQQEASKLRRQIRDIQNSNRHIVGESLGSLNFKELKNLEGRLEKGISRVRSKKSELLVAEIEYMQKREMELQHVNMYLRAKIEQGARLNPEQHGSGVIQGTAVYESGLSSSHDQSQHYNRNYIPVNLLEPNQQFSGQDQPPLQLV

SEQ ID NO: 1831 - protein, 841 aa, Arabidopsis thaliana
MELDDLDLSGSWPLDQITFASNFKSPVIFSSSEQPFSPLWSFSETSGDVGGELYSAAVAPTRFTDYSVLLASSESETTTKENNQVPSPSWGIMPLENPDSYCAIKAKMTQALRYFKESTGQQHVLAQVWAPVKNRGRYVLTTSGQPFVLGPNSNGLNQYRMVSLTYMFSLDGERDGELGLPGRVFRKKLPEWTPNVQYYSSKEFSRLGHALHYNVQGTLALPVFEPSRQLCVGVVELIMTSPKINYAPEVEKVCKALEAVNLKTSEILNHETTQICNEGRQNALAEILEILTVVCETYKLPLAQTWVPCRHRSVLAFGGGFKKSCSSFDGSCMGKVCMSTSDLAVYVVDAHVWGFRDACAEHHLQKGQGVAGRAFQSGNLCFCRDVTRFCKTDYPLVHYARMFKLTSCFAVCLKSTYTGDDEYVLEFFLPPAITDKSEQDCLLGSLLQTMKQHYSSLKVVSETELCENNMSLEVVEASEDGMVYSKLEPIRIHHPAQISKDYLELNAPEQKVSLNSDFMENNEVDDGVERFQTLDPIPEAKTVKKSERKRGKTEKTISLEVLQQYFAGSLKDAAKSLGVCPTTMKRICRQHGISRWPSRKINKVNRSLTRLKHVIDSVQGADGSLNLTSLSPRPWPHQIPPIDIQLAKNCPPTSTSPLSNLQDVKIENRDAEDSAGSSTSRASCKVNPICETRFRLPTHNQEPSRQVALDDSDSSSKNMTNFWAHLTCQDTASPTILQHKLVSIKATYREDIIRFKISPESVSITELKQQVAKRLKLETAAFELKYLDDDREWVSVSCDADLSECLDTSAAKANTLRLSVHDVTFNFGSSCESSEETMMCL

SEQ ID NO: 1832 - protein, 221 aa, Capsicum annuum
MGVCYGMMGNNLPSHSEVIQLYKSRNIGRLRLYDPNHGALNALRGSNIEVILGLPNVDVKHISSGMEHARWWVQKNVKDFWPDVKIKYIAVGNEISPVTGTSSLTSFQVPALVNIYKAIGEAGLGNDIKVSTSVDMTLIGNSYPPSQGSFRNDVRWFTDPIVGFLRDTRAPLLVNIYPYFSYSGNPGQISLPYALFTAPNVVVQDGSRQYRNLFDAMLDSV

SEQ ID NO: 1833 - protein, 479 aa, Dialypetalanthus fuscescens
STLEKKNLGRIVQIIGPVLDVAFPPGKMPNIYNALVVKGRDTVGQPINVTCEVQQLLGNNRVRAVAMSATDGLTRGMEVIDTGAPLSVPVGGATLGRIFNVLGEPVDNLGPVDTRTTSPIHRPAPAFIQLDTKLSIFETGIKVVDLLAPYRRGGKIGLFGGAGVGKTVLIMELINNIAKAHGGVSVFGGVGERTREGNDLYMEMKESGVINEENIAESKVALVYGQMNEPPGARMRVGLTALTMAEYFRDVNEQDVLLFIDNIFRFVQAGSEVSALLGRMPSAVGYQPTLSTEMGSLQERITSTKEGSITSIQAVYVPADDLTDPAPATTFAHLDATTVLSRGLAAKGIYPAVDPLDSTSTMLQPRIVGEEHYETAQRVKQTLQRYKELQDIIAILGLDELSEEDRLTVARARKIERFLSQPFFVAEVFTGSPGKYVGLAETIRGFQLILSGELDGLPEQAFYLVGNIDEATAKAMNLE

SEQ ID NO: 1834 - protein, 510 aa, Lilium longiflorum
MANIDIEGILKELPADGRVPKTKLVCTLGPSSRSVPMLEKLLRAGMNTARFNFSHGTHEYHQETLDNLRIAMQNTQILCAVVLDTKGPEIRTGFLKDGKAVQPKEGQEIIVSTDYDLKGGGNTITMSYKKLPVDMKPGGTILCADGSISLTVLSCDPDAGTVRCRCENTALLGERKNVNLPGVVVDLPTLTEKDKEDILEWGVPNNIDMIALSFVRKGSDLVNVRQVLGSHAKNIKLMSKVENQEGVVNFDEILKETDAFMVARGDLGMEIPVEKIFLAQKLMIYICNLAGKPVVTATQMLESMIKSPRPTRAEATDVANAVLDGTDCVMLSGESAAGAYLEIAVKVMAKICIEAESSLDYDAIFKEMIRSAPLPMSPLESLASSAVRTANKAKAALIVVLTRGGTTAKLVAKYRPAVPILSVVVPVLTSDSFDWNVSDESPARHSLIYRGLIPLLAEGSAKATDAESTEVILEAALKSATARRLCKPGDSIVALHRIGVASVIKICIVK

SEQ ID NO: 1835 - protein, 240 aa, Triticum aestivum
DGSTRKCFSSLSTSIRKLLSFKAAGNESFQARRYSEAVEQYSAALAYNSDSRPFSAVCFCNRAAAYQALGQLTDAIADCSLAMVLDANYPKAISRRATLYEMIRDYGQSANDLRKLISLLQKQANNKPGVSPKVFNKHSDLKQARARLLSAEDEARKDTPLNFYLILGVEPSCSPADVKKAYRKAALRHHPDKATQLLVRNENADDGFWKDVAKEVYADADHLFKTIGEAYNILSDPDKR

SEQ ID NO: 1836 - protein, 205 aa, Glycine max
  unsure (1)..(205): unsure at all Xaa locations
APPPCGSDVIELGVPYSDPLAGXPVIQASATRALAKGTTFEDVISMVKGVIPDLSCPVALFTYYNPILKRGVPNFMSIVKEAGVHGLVVPDVPLEETDVLRSEAXKNNLXLVLLTTPTTPNERMEKIAQASEGFIYLVSTVGVTGTCANVSGKVQSLLQDIKKVTEKPVAVGFGVSTPEHVRQIXGWGADXVIIGSAVMKTXEEA

SEQ ID NO: 1837 - protein, 268 aa, Salmonella enterica subsp. enterica serovar Typhi
MERYENLFAQLNDRREGAFVPFVTLGDPGIEQSLKIIDTLIDAGADALELGVPFSDPLADGPTIQNANLRAFAAGVTPAQCFEMLALIREKHPTIPIGLLMYANLVFNNGIDAFYARCEQVGVDSVLVADVPVEESAPFRQAALRHNIAPIFICPPNADDDLLRQVASYGRGYTYLLSRSGVTGAENRGALPLHHLIEKLKEYHAAPALQGFGISSPEQVSAAVRAGAAGAISGSAIVKIIEKNLASPEQMLAELRSFVSAMKAASRA

SEQ ID NO: 1838 - protein, 490 aa, Wilsonia humilis
MRINPTTSGSEVSAVEKKNLGRIVQIIGPVLDVAFPAGKMPNIYNALVVQGRDNEQTNVTCEVQQLVGNNRVRTVAMSDTDGLMRGMEVIDTGAPISVPVGGSTLGRIFNVLGEPVDNLGPVDTKTTSPIHRSAPAFVQLDTKLSIFETGIKVVDLLAPYRRGGKIGLFGGAGVGKTVLIMELINNIAKAHGGVSVFGGVGERTREGNDLYMEMKESGVINEEDIAESKVALVYGQMNEPPGARMRVGLTALTMAEYFRDVNEQDVLLFIDNIFRFVQAGSEVSALLGRMPSAVGYQPTLSTEMGSLQERITSTKEGSITSIQAVYVPADDLTDPAPATTFAHLDATTVLSRGLAAKGIYPAVDPLDSTSTMLQPRIVGEEHYETAQRVKQTLQRYKELQDIIAILGLDELSEEDRLTVARARKIERFLSQPFFVAEIFTGSPGKYVGLAETIRGFQLILSGELDGLPEQAFYLVGNIDEATAKAMNLKT

SEQ ID NO: 1839 - protein, 402 aa, Chara connivens
LLGDNKVRAVAMSATDGLMRGMEVIDTGSPLSVPVGETTLGRIFNVLGEPVDNLGPVDTSITFPIHRAAPAFTQLDTKLSIFETGIKVVDLLAPYRRGGKIGLFGGAGVGKTVLIMELINNIAKAHGGVSVFGGVGERTREGNDLYMEMKESKVINEENISESKVALVYGQMNEPPGARMRVGLTALTMAEYFRDVNKQDVLLFIDNIFRFVQAGSEVSALLGRMPSAVGYQPTLSTEMGTLQERITSTKEGSITSIQAVYVPADDLTDPAPATTFAHLDATTVLSRNLAAKGIYPAVDPLDSTSTMLQPWIVGEEHYETAQGVKETLQRYKELQDIIAILGLDELSEEDRLIVARARKIERFLSQPFFVAEVFTGSPGKYVSLIDTIKGFQMILSGELDHL

SEQ ID NO: 1840 - protein, 470 aa, Cytophaga hutchinsonii
MVNKKTKIIATVGPACNTKEKLWELVQAGANIFRLNFSHGTHDVHQGVINAIRELRKEHNVNIAILQDLQGPKIRTDEVENNGVELVAGAQIVITKEKMLGTKDKISTSYKMLTSDVKKGDAILIDDGNIELKVLETGNGEVTCVVIYGGILKSRKGINLPNTIVSEPSLTDKDKEDLLFGLKNEVDWIALSFVRSAVDLNELKAIIAEHGKSCKVIAKVEKPEAVKDIDAIIEASDAIMVARGDLGVELQMEDVPMIQKMIIKKCNQLAKPVIVATQMMESMITNARPTRAEASDVANAIIDGTDTIMLSAETASGNYPVITVKAMTRICQAVEKEADIYNKSTLDDITNTSDSVIASACELADKVNAKAIIGLSQSGYSAFRIASHRPKASIYIATHDEQLMNQMNLVWGVQAFRFEKFTTTDESIEAVKKSLVEKGLLKKGDIYVTTASMPMADIQLANSLKLGIVE

SEQ ID NO: 1841 - protein, 254 aa, Glycine max
GKLNASEKLRQMRPSLSRKFSSYVLATPVDAKSSTSSGSNNPKPSNMQANLREPTKNLWHSSPLEQKKHDKDMGDEFSGSIIRNSLLSSNRDYISAYSKKIKRHAFSGPLTSNLGPTNPVNCSLSSSPKVSPSASLTLMTSPQISELHELPRPPTSFPSNSRLLGLVGHSGPLVSRGQKVTANNLVAPGAASPLPMPPQAMARSFSIPSSGARVAALHMPRTLESSHRSSISENIASPPLMPISLSSSRPSLDG

SEQ ID NO: 1842 - protein, 275 aa, Methanopyrus kandleri AV19
MSGLVLERIFEEAEGEGRGALIGYLTCGHPGLEETVSLARALRDGGVDILELGVPFSEPIADGPTIQKAVDEALRAGTTPWDCLEVAEEVSEFVPVVLLCYYNTLHANGFERYLSAAAEAGVSGIIVADMPVEESDEVHSVARDLEIDVIYLVAPSTTDERLKKIGERASGFVYVISRYGVTGARRDLSEDTLELVRWVRDHVDVPVAVGFGISERWHVEEVIAAGADGAIVGSAFIKEIHRSEDIAEAEERVRELAKELVEGARDGYRRRSSSE

SEQ ID NO: 1843 - protein, 610 aa, Mycobacterium tuberculosis H37Rv
MTRPQAAAEDARNAMVAGLLASGISVNGLQPSHNPQVAAQMFTTATRLDPKMCDAWLARLLAGDQSIEVLAGAWAAVRTFGWETRRLGVTDLQFRPEVSDGLFLRLAITSVDSLACAYAAVLAEAKRYQEAAELLDATDPRHPFDAELVSYVRGVLYFRTKRWPDVLAQFPEATQWRHPELKAAGAAMATTALASLGVFEEAFRRAQEAIEGDRVPGAANIALYTQGMCLRHVGREEEAVELLRRVYSRDAKFTPAREALDNPNFRLILTDPETIEARTDPWDPDSAPTRAQTEAARHAEMAAKYLAEGDAELNAMLGMEQAKKEIKLIKSTTKVNLARAKMGLPVPVTSRHTLLLGPPGTGKTSVARAFTKQLCGLTVLRKPLVVETSRTKLLGRYMADAEKNTEEMLEGALGGAVFFDEMHTLHEKGYSQGDPYGNAIINTLLLYMENHRDELVVFGAGYAKAMEKMLEVNQGLRRRFSTVIEFFSYTPQELIALTQLMGRENEDVITEEESQVLLPSYTKFYMEQSYSEDGDLIRGIDLLGNAGFVRNVVEKARDHRSFRLDDEDLDAVLASDLTEFSEDQLRRFKELTREDLAEGLRAAVAEKKTK

SEQ ID NO: 1844 - protein, 890 aa, Saccharomyces cerevisiae
MNQEEAIFRSADMTYVQLYIPLEVIREVTFLLGKMSVFMVMDLNKDLTAFQRGYVNQLRRFDEVERMVGFLNEVVEKHAAETWKYILHIDDEGNDIAQPDMADLINTMEPLSLENVNDMVKEITDCESRARQLDESLDSLRSKLNDLLEQRQVIFECSKFIEVNPGIAGRATNPEIEQEERDVDEFRMTPDDISETLSDAFSFDDETPQDRGALGNDLTRNQSVEDLSFLEQGYQHRYMITGSIRRTKVDILNRILWRLLRGNLIFQNFPIEEPLLEGKEKVEKDCFIIFTHGETLLKKVKRVIDSLNGKIVSLNTRSSELVDTLNRQIDDLQRILDTTEQTLHTELLVIHDQLPVWSAMTKREKYVYTTLNKFQQESQGLIAEGWVPSTELIHLQDSLKDYIETLGSEYSTVFNVILTNKLPPTYHRTNKFTQAFQSIVDAYGIATYKEINAGLATVVTFPFMFAIMFGDMGHGFILFLMALFLVLNERKFGAMHRDEIFDMAFTGRYVLLLMGAFSVYTGLLYNDIFSKSMTIFKSGWQWPSTFRKGESIEAKKTGVYPFGLDFAWHGTDNGLLFSNSYKMKLSILMGYAHMTYSFMFSYINYRAKNSKVDIIGNFIPGLVFMQSIFGYLSWAIVYKWSKDWIKDDKPAPGLLNMLINMFLAPGTIDDQLYSGQAKLQVVLLLAALVCVPWLLLYKPLTLRRLNKNGGGGRPHGYQSVGNIEHEEQIAQQRHSAEGFQGMIISDVASVADSINESVGGGEQGPFNFGDVMIHQVIHTIEFCLNCISHTASYLRLWALSLAHAELSSVLWDMTISNAFSSKNSGSPLAVMKVVFLFAMWFVLTVCILVFMEGTSAMLHALRLHWVEAMSKFFEGEGYAYEPFSFRAIIE

SEQ ID NO: 1845 - protein, 890 aa, Arabidopsis thaliana
MTFWCMSILLIVGFLSKSELCEAQLSDEATLVAINRELGVPGWSSNGTDYCTWVGLKCGVNNSFVEMLDLSGLQLRGNVTLISDLRSLKHLDLSGNNFNGRIPTSFGNLSELEFLDLSLNRFVGAIPVEFGKLRGLRAFNISNNLLVGEIPDELKVLERLEEFQVSGNGLNGSIPHWVGNLSSLRVFTAYENDLVGEIPNGLGLVSELELLNLHSNQLEGKIPKGIFEKGKLKVLVLTQNRLTGELPEAVGICSGLSSIRIGNNELVGVIPRTIGNISGLTYFEADKNNLSGEIVAEFSKCSNLTLLNLAANGFAGTIPTELGQLINLQELILSGNSLFGEIPKSFLGSGNLNKLDLSNNRLNGTIPKELCSMPRLQYLLLDQNSIRGDIPHEIGNCVKLLQLQLGRNYLTGTIPPEIGRMRNLQIALNLSFNHLHGSLPPELGKLDKLVSLDVSNNLLTGSIPPLLKGMMSLIEVNFSNNLLNGPVPVFVPFQKSPNSSFLGNKELCGAPLSSSCGYSEDLDHLRYNHRVSYRIVLAVIGSGVAVFVSVTVVVLLFMMREKQEKAAAKNVDVEENVEDEQPAIIAGNVFLENLKQGIDLDAVVKATMKESNKLSTGTFSSVYKAVMPSGMIVSVKKLKSMDRAISHHQNKMIRELERLSKLCHDHLVRPIGFVIYEDVALLLHQHLPNGNLTQLIHESTKKPEYQPDWPMRLSIAVGAAEGLAFLHQVAIIHLDVSSSNVLLDSGYKAVLGEIEISKLLDPSRGTASISSVAGSFGYIPPEYAYTMQVTAPGNVYSYGVVLLEILTSRAPVEEEFGEGVDLVKWVHGASARGETPEQILDAKLSTVSFAWRREMLAALKVALLCTDITPAKRPKMKKVVEMLQEVKQIK

SEQ ID NO: 1846 - protein, 226 aa, Bacillus halodurans
MDCPFEAVIFDMDGVIADTVGLHYEANQHIAKKLSVTFSEEMNQSLQGLSREKTVRAICDLTGEEVSDEQVKQLSELRNEQYQRLIAELTPADALPGIYSFIRELKEKKVSIALASASTNAPRVLSRLQLIDAFDVIVDVQKVRRGKPDPEIFLTAAQLLGVSSNRCVAIEDGEAGLTGILQTDMFAVGVGTHSAMKKAHWQVASTEELSIKSLINAVEKTRNKDI

SEQ ID NO: 1847 - protein, 498 aa, Sollya heterophylla
  unsure (1)..(498): unsure at all Xaa locations
XXXNPTTSGSEVSTLEKKNLGSIAQIIGPVLDVAFPPGKMPNIYNALVVKGQDTVGQQINVTCEVQQLLGNNRVRAVAMSATEGLTRGMEVVDTGAPLSVPVGGTTLGRIFNVLGEPVDNLGPIDTRTTSPIHRSAPAFIQLETKLSIFETGIKVVDLLAPYRRGGKIGLFGGAGVGKTVLIMELINNIAKAHGGVSVFGGVGERTREGNDLYMEMKESGVINEQNIEESKVALVYGQMNEPPGARMRVGLTALTMAEYFRDVNEQDVLLFIDNIFRFVQAGSEVSALLGRMPSAVGYQPTLSTEMGTLQERITSTKEGSITSIQAVYVPADDLTDPAPATTFAHLDATTVLSRGLAAKGIYPAVDPLDSTSTMLQPRIVGEEHYETAQRVKQTLQRYKELQDIIAILGLDELSEEDRLTVARARKIERFLSQPFFVAEVFTGSPGKYVGLAETIRGFQLILSGELDGLPEQAFYLVGNIDEATAKAINLEMESNSKK

SEQ ID NO: 1848 - protein, 485 aa, Pouteria macrantha
GVSVLEKKNLGRFIQIIGPVLDVAFTPGKMPNIYNALVVKGRDTVGKPINVTCEVQQLLGNNRVRAVAMSATDGLMRGMEVIDTGAPLSVPVGGATLGRIFNVLGEPIDNLGPVDTRTTSPIHRSAPAFIQLDTKLSIFETGIKVVDLLAPYRRGGKIGLFGGAGVGKTVLIMELINNIAKAHGGVSVFGGVGERTREGNDLYMEMKESGVINEQNIAESKVALVYGQMNEPPGARMRVGLTALTMAEYFRDVNEQDVLLFIDNIFRFVQAGSEVSALLGRMPSAVGYQPTLSTEMGSLQERITSTKEGSITSIQAVYVPADDLTDPAPATTFAHLDATTVLSRGLAAKGIYPAVDPLDSTSTMLQPRIVGEEHYETAQKVKQTLQRYKELQDIIAILGLDELSEEDRLTVARARKIERFLSQPFFVAEVFTGSPGKYVGLAETIRGFQLILSGELDGLPEQAFYLVGNIDEATAKAMNLEMESN

SEQ ID NO: 1849 - protein, 762 aa, Allium macrostemon
MWKLLKMADGGNQWLRTTNNHAGRQIWEFDPNLGTPEEIEAVENAREIYRKNRFKMKHSSDLLMRLQFAKENPAEIGLPQVKLAENENITEEAAAITLRRAMNRYSTLQAHDGQWPGDYGGPMFLMPGLIIALSVTGALNTVLSVEHQHEIRRYLYNHQNEDGGWGLHIEGHSTMFGSVLAYVTLRLLGEGADGGDDQAMQKGRKWILDHGSATAITSWGKFWLSVLGVFDWSGNNPLPPEMYLLPYVLPVHPGRMWCHCRMIYLPMSYIYGKRFVGPVTQTIISLRKELFNVPYDQVDWNAARNQCAKEDLYYPHPLIQDILWTTLHKCVEPILMRWPGGKLRGKALKTVMEHVHYEDENTRYICLGHFSKVLNMLCCWVEDQNSEAFKLHLPRLNDYLWIAEDGMKIQGYNGSQLWDTAYAVQAIIATGFSNEFGTTLKKAYKYVKDSQVLEDCPGDLSYWHRHISKGSWPFSTADQGWLVSDCTAEGLKAALLLSKISPEIVGDPIVANRLYDAVNVILSLKNPGGGFASIELTRSYAWLEIINPAESFGDIVIDYPTAESTSACIQALASFRMLYPGHRRDEIEKCITKGVQFIEKTQEHDGSWYGSWAVCYTNGTWYGVKGLISGGKCYENSHSIRKACDFLLSKQLKSGGWGESYLSCQEKVYTNLEGNRAHAVNTSWAMLALIDAGQAQRDAEPLHRAAKVLINMQMENGEFPQQEIMGVFNRNCMISYSAYRNIFPIWALGEYRTRVLSSSAGH

SEQ ID NO: 1850 - protein, 279 aa, Mesorhizobium loti
MTTRIDRRMAKLKTEGRPALVTYFMGGDPDYDTSLSIMKALPGAGSDIIELGMPFSDPMADGPAIQAAGLRALKGGQTLVKTLKMASEFRAGDNETPIVLMGYYNPIYIYGVDRFLKDALASGIDGLIVVDLPPEMDEELCIPALKAGINFIRLATPTTDDKRLPKVLQNTSGFVYYVSMTGITGSALADTGKVAAAVNRIKGHTDLPVCVGFGVKTAEQARVIGANADGVVVGTAIVNAVANVLGPKGEKTADPAEAVATLVSGLAQGVRSARLAAAE

SEQ ID NO: 1851 - protein, 475 aa, Odontella sinensis
MVKTNINKGYVNQIIGPVLDIEFPSGTLPPIYSALKIETEDGIGTVVEVQQLLGDNKVRAVSMRSTDGLKRGVEARDLGGPISVPVGISTLGRIFNVIGEPVDEQGDVSYDETLPIHREAPAFTELETKPSIFETGIKVVDLLAPYRRGGKIGLFGGAGVGKTVLIMELINNIAKAHGGVSVFGGVGERTREGNDLYEEMKESGVINENNFKESKVALVYGQMNEPPGARMRVGLTALTMAEYFRDVNKQDVLLFIDNIFRFTQAGSEVSALLGRMPSAVGYQPTLATEMGALQERITSTTQGSITSIQAVYVPADDLTDPAPATTFAHLDATTVLSRNLAAKGIYPAVDPLDSTSTMLQPGIVSGEHYEIAETVKETLQRYKELQDIIAILGIDELSEEDRLTVARARKVERFLSQPFFVAEIFTGSPGKYVSLEETIKGFTMVLKGELDELPEQAFYLVGNIDEAIAKAETLK

SEQ ID NO: 1852 - protein, 1207 aa, Lycopersicon peruvianum
MKAHKTVFNQHPLSLNKLFFVLLLIFFLPPASPAASVNGLYKDSQQLLSFKAALPPTPTLLQNWLSSTDPCSFTGVSCKNSRVSSIDLSNTFLSVDFSLVTSYLLPLSNLESLVLKNANLSGSLTSAAKSQCGVTLDSIDLAENTISGPISDISSFGVCSNLKSLNLSKNFLDPPGKEMLKGATFSLQVLDLSYNNISGFNLFPWVSSMGFVELEFFSIKGNKLAGSIPELDFKNLSYLDLSANNFSTVFPSFKDCSNLQHLDLSSNKFYGDIGSSLSSCGKLSFLNLTNNQFVGLVPKLPSESLQYLYLRGNDFQGVYPNQLADLCKTVVELDLSYNNFSGMVPESLGECSSLELVDISNNNFSGKLPVDTLLKLSNIKTMVLSFNKFVGGLPDSFSNLPKLETLDMSSNNLTGIIPSGICKDPMNNLKVLYLQNNLFKGPIPDSLSNCSQLVSLDLSFNYLTGSIPSSLGSLSKLKDLILWLNQLSGEIPQELMYLQALENLILDFNDLTGPIPASLSNCTKLNWISLSNNQLSGEIPASLGRLSNLAILKLGNNSISGNIPAELGNCQSLIWLDLNTNFLNGSIPPPLFKQSGNIAVALLTGKRYVYIKNDGSKECHGAGNLLEFGGIRQEQLDRISTRHPCNFTRVYRGITQPTFNHNGSMIFLDLSYNKLEGSIPKELGAMYYLSILNLGHNDLSGMIPQQLGGLKNVAILDLSYNRFNGTIPNSLTSLTLLGEIDLSNNNLSGMIPESAPFDTFPDYRFANNSLCGYPLPLPCSSGPKSDANQHQKSHRRQASLAGSVAMGLLFSLFCIFGLIIVAIETKKRRRKKEAALEAYMDGHSHSATANSAWKFTSAREALSINLAAFEKPLRKLTFADLLEATNGFHNDSLVGSGGFGDVYKAQLKDGSVVAIKKLIHVSGQGDREFTAEMETIGKIKHRNLVPLLGYCKVGEERLLVYEYMKYGSLEDVLHDRKKTGIKLNWPARRKIAIGAARGLAFLHHNCIPHIIHRDMKSSNVLLDENLEARVSDFGMARLMSAMDTHLSVSTLAGTPGYVPPEYYQSFRCSTKGDVYSYGVVLLELLTGKQPTDSADFGDNNLVGWVKLHAKGKITDVFDRELLKEDASIEIELLQHLKVACACLDDRHWKRPTMIQVMAMFKEIQAGSGMDSTSTIGADDVNFSGVEGGIEMGINGSIKEGNELSKHL

SEQ ID NO: 1853 - protein, 171 aa, Nicotiana glutinosa
LRDTRAPLLVNIYPYFSYSGNPGQISLPYSLFTAPNVVVQDGSRQYRNLFDAMLDSVYAALERSGGASVGIVVSESGWPSAGAFGATYDNAATYLRNLIQHAKEGSPRKPGPIETYIFAMFDENNKNPELEKHFGLFSPNKQPKYNLNFGVSGRVDSSVETNATASLISEM

SEQ ID NO: 1854 - protein, 470 aa, Desulfovibrio desulfuricans G20
MRTKIIATVGPASSGRETLSRLIQAGVRIFRLNFSHGDASQFVDLIALMRQLEAEYQTPITLLQDLSGPKIRIGELPDGALTLAKDDRILLGIPGKAAADGLPFVPFTHKTILDGMEPGDRVVLSDGGLQFHVESKVGPDLFCLVANNSGIITSRKGLALPGKPIHLAALTEKDKKDLQDGLRMGVDAVALSFVQTPEDVAEAKALIKAAGRNVPVIAKLERRNAVDRLEEILEVTDIVMVARGDLGVECPLPELPAMQKRIIRACNRKAKPVIVATQMLLSMVNSPSPTRAETTDVANAVLDGADCVMLSEETAMGNFPVETVQFMRQIVRAAEELHLEQSSVLPPLDEQKTPDFLAYSACLLADKTCAGAIVAHSMSGSAARVLSARRPRQTIHALTPDDEALRFLNFSWGVWPHKVDETLPGHLERAELFVDNAPQFEDGAEVVITAGQPKPGEKPRGTNLVKIYRK

SEQ ID NO: 1855 - protein, 476 aa, Lycopersicon esculentum
MNSAPLSTPAPVTLPVRSIPGSYGLPLVGPIADRLDYFWFQKPENFFTKRMEKHKSTVFRTNVPPCFPFFGSVNPNVVAVLDVKSFSHLFDMEIVEKANVLVGDFMPSVVYTGDMRVCAYLDTSEPKHAQIKNFSQDILKRGSKTWVPTLLKELDTMFTTFEADLSKSNTASLLPALQKFLFNFFSLTILGADPSVSPEIANSGYIFLDSWLAIQLAPTVSIGVLQPLEEILVHSFAYPFFLVKGNYEKLVQFVKNEAKEVLSRAQTEFQLTEQEAIHNLLFILGFNAFGGFSIFLPTLLGNLGDEKNADMQEKLRKEVRDKVGVNPENLSFESVKEMELVQSFVYETLRLSPPVPSQYARARKDFKLSSHDSVYEIKKGELLCGYQPLVMKDPKVFDEPEKFVLERFTKEKGKELLNYLFWSNGPQTGRPTESNKQCAAKDMVTLTASLIVAYIFQKYDSVSFSSGSLTSVKKAS

SEQ ID NO: 1856 - protein, 526 aa, Emericella nidulans
MAASSSLDHLSNRMKLEWHSKLNTEMVPAKNFRRTSIICTIGPKTNSVEKINALRRAGLNVVRMNFSHGSYEYHQSVIDHAREAEKQAAGRPVAIALDTKGPEIRTGNTVGDKDIPIKAGHEMNISTDEQYATASDDQNMYVDYKNITKVISAGKLIYVDDGILSFEVLEVVDDKTLRVRCLNNGNISSRKGVNLPGTDVDLPALSEKDISDLKFGVKNKVDMVFASFIRRGSDIRHIREVLGEEGREIQIIAKIENQQGVNNFDEILEETDGVMVARGDLGIEIPAPKVFIAQKMMIAKCNIKGKPVICATQMLESMTYNPRPTRAEVSDVANAVLDGADCVMLSGETAKGNYPCEAVTMMSETCLLAEVAIPHFNVFDELRNLAPRPTDTVESIAMAAVSASLELNAGAIVVLTTSGNTARMISKYRPVCPIIMVSRNPAATRYSHLYRGVWPFYFPEKKPDFNVKIWQEDVDRRLKWGINHGLKLGIINKGDNIVCVQGWRGGMGHTNTVRVVPAEENLGLSE

SEQ ID NO: 1857 - protein, 476 aa, Triglochin maritimum
EEKNLGRIAQIIGPVLDVAFPPGKMPNIYNALVVKGRDTVGQQINVTCEVQQLLGNNRVRAVAMSATDGLRRGMEVIDTGAPLSVPVGGVTLGRIFNVLGEPVDNLGPLDTRTTSPIHRSAPAFIQLDTKLSIFETGIKVVDLLAPYRRGGKIGLFGGAGVGKTVLIMELINNIAKAHGGVSVFGGVGERTREGNDLYMEMKESGVINEQNIAESKVALVYGQMNEPPGARMRVGLTALTMAEYFRDVNEQDVLLFIDNIFRFVQAGSEVSALLGRMPSAVGYQPTLSTEMGSLQERITSTKKGSITSIQAVYVPADDLTDPAPATTFAHLDATTVLSRGLAAKGIYPAVDPLDSTSTMLQPRIVGEEHYETAQRVKETLQRYKELQDIIAILGLDELSEEDRLTVARARKIERFLSQPFFVAEVFTGSPGKYVSLAETIRGFRLILSGELDSLPEQAFYLVGNIDEATSKAINLE

SEQ ID NO: 1858 - protein, 480 aa, Breweria rotundifolia
QVSTVEKKNLGRIVQIIGPVLDVAFPPGKMPNIYNALVVQGRDNEQMNVACEVQQLLGNNRVRAVAMSDTNGLMRGMEVIDTGAPISVPVGGATLGRIFNVLGEPVDNLGPVDTKTTSPIHRSAPAFIQLDTKFSIFETGIKVVDLLAPYRRGGKIGLFGGAGVGKTVLIMELINNIAKAHGGVSVFGGVGERTREGNDLYMEMKESRVINEENIAESKVALVYGQMNEPPGARMRVGLTALTMAEYFRDVNEQDVLLFIDNIFRFVQAGSEVSALMGRMPSAVGYQPTLSTEMGSLQERITSTKEGSITLIQAVYVPADDLTDPAPATTFAHLDATTVLSRGLAAKGIYPAVDPLDSTSTMLQPRIVGEEHYETAQRVKQTLQRYKELQDIIAILGLDELSEEDRLTVARARKIERFLSQPFFVAEVFTGSPGKYVGLAETIRGFQLILSGELDGLPEQAFYLVGNIDEATAKAMNLKT

SEQ ID NO: 1859 - protein, 750 aa, Lotus japonicus
PYIFSTNNFVGRQTWEYDPDAGTPEERAQVEEARQDFYNNRYKVKPCGDLLWRFQVLRENNFKQTIPSVKIEDGEEITYEKATTTLKRAAHHLAALQTSDGHWPAQIAGPLFFQPPLVFCMYITGHLNSVFPEEYRKEILRYIYVHQNEDGGWGLHIEGHSTMFCTALNYICMRMLGEGPDGGQDNACARARKWILDHGGVTHIPSWGKTWLSILGIFDWKGSNPMPPEFWILPSFLPMHPAKMWCYCRLVYMPMSYLYGKRFVGPITPLILQLREELFTQPYEKVNWKKARHQCAKEDIYYPHPLIQDLMWDSLYLFTEPLLTRWPFNKLVREKALEVTMKHIHYEDENSRYITIGCVEKVLCMLACWVEDPNGDAFKKHLARVPDYLWVSEDGMCMQSFGSQEWDAGFAVQALLATNLVDELGPTLAKGHDFIKKSQVRDNPSGDFKNMHRHISKGSWTFSDQDHGWQVSDCTAEGLKCCLLLSMLPPDIVGEKMEPECLFDSVNLLLSLQSKKGGLAAWEPAGAQEWLELLNPTEFFADIVVEHEYVECTGSAIGALVLFKKLYPGHRKKEIENFISEAVRFLEDTQTADGSWYGNWGVCFTYGSWFALGGLAAAGKTYANCAAIRKAVKFLLTTQRGDGGWGESYLSSPKKIYVPFEGNRSNVVHTAWALMGLIHSGQAERDPTPLHRAAKLLINSQLEEGDWPQQEITGVFMKNCMLHYPMYRDIYPMWALAEYRRRVPLPSTAV

SEQ ID NO: 1860 - protein, 301 aa, Glycine max
MEEQECQVVENKETPTPPVRVYADGIYDLFHFGHARSLEQAKKLFPNTYLLVGCCNDEITHKYKGKTVMTEKERYESLRHCRWVDEVIPDAPWVITREFLDKHQIDYVAHDSLPYADASGAGKDVYEYVKSVGKFKETKRTDGISTSDIIMRIIKDYNQYVMRNLDRGYTRKELGVSYVKEKRLRMNMGLKKLQERVKKQQEKVGKKIQTVGKIAGMHPNEWVENADRLVAGFLEMFEEGCHKMGTAIRDRIQEQLKAQQLKSLLYDEWDDDNESMMMMMNTTQTKVTNKLVFLGSEHSHK

SEQ ID NO: 1861 - protein, 496 aa, Maranta bicolor
  unsure (1)..(496): unsure at all Xaa locations
MRTNPTTSSPXVSTLEEQNLGXIAQIIGPVLDVVFPPGKMPNIYNALVVKGRDTVGQQINVTCEVQQLLGNNRVRAVAMSATDGLTRGMEVIDTGAPLSVPVGGATLGRIFNVLGEPVDNLGPVDTSTTSPIHRPAPAFIQLDTKLSIFETGIKVVDLLAPYRRGGKIGLFGGAGVGKTVLIMELINNIAKAHGGVSVFGGVGERTREGNDLYMEMKESGVINEKNIAESKVALVYGQMNEPPGARMRVGLTALTMAEYFRDVNEQDVLLFIDNIFRFVQAGSEVSALLGRMPSAVGYQPTLSTEMGSLQERITSTKEGSITSIQAVYVPADDLTDPAPATTFAHLDATTVLSRGLAAKGIYPAVDPLDSTSTMLQPRIVGEEHYETAQRVKQTSQRYKELQDIIAILGLDELSEEDRLTVARARKIERFLSQPFFVAEVFTGSPGKYVGLAETIRGFQLILSGELDSLPEQAFYLVGNIDEATAKAMNLEGESKL

SEQ ID NO: 1862 - protein, 502 aa, Lactococcus lactis subsp. lactis
MNKRVKIVSTLGPAVEIRGGKKFGESGYWGESLDVEASAKNIAALIEEGANVFRFNFSHGDHPEQGARMATVHRAEEIAGHKVGFLLDTKGPEMRTELFADGADAISVVTGDKFRVATKQGLKSTPELIALNVAGGLDIFDDVEIGQTILIDDGKLGLSLTGKDAATREFEVEAQNDGVIGKQKGVNIPNTKIPFPALAERDDADIRFGLSQPGGINFIAISFVRTANDVKEVRRICEETGNPHVQLLAKIENQQGIENLDEIIEAADGIMIARGDMGIEVPFEMVPVYQKLIISKVNKAGKIVVTATNMLESMTYNPRATRSEISDVFNAVIDGTDATMLSGESANGKYPRESVRTMATVNKNAQTMLKEYGRLHPERYDKSTVTEVVAASVKNAAEAMDIKLIVALTESGNTARLISKHRPNADILAITFDEKVERGLMINWGVIPTMTEKPSSTDDMFEVAEKVALASGLVESGDNIIIVAGVPVGTGRTNTMRIRTVK

SEQ ID NO: 1863 - protein, 498 aa, Trochodendron aralioides
MRINPTISGPGVSTLEEKNLGRVAQIIGPVLDVAFPPGKMPNIYNALVVKGRDTVGQQINVTCEVQQLLGNNRVRAVAMSATDGLTRGLEVIDTGAPLSVPVGGATLGRIFNVLGEPVDNLGPVDTRTTSPIHRSAPAFIQLDTKLSIFETGIKVVDLLAPYRRGGKIGLFGGAGVGKTVLIMELINNIAKAHGGVSVFGGVGERTREGNDLYMEMKESGVINEQNIAESKVALVYGQMNEPPGARMRVGLTALTMAEYFRDVNEQDVLLFIDNIFRFVQAGSEVSALLGRMPSAVGYQPTLSTEMGSLQERITSTKEGSITSIQAVYVPADDLTDPAPATTFAHLDATTVLSRGLAAKGIYPAVDPLDSTSTMLQPRIVGEEHYETAQRVKQTLQRYKELQDIIAILGLDELSEEDRLTVARARKIERFLSQPFFVAEVFTGSPGKYVGLAETIRGFQLILSGELDGLPEQAFYLVGNIDEATAKAMNLEVESKLKK

SEQ ID NO: 1864 - protein, 490 aa, Petrophile circinata
  unsure (1)..(490): unsure at all Xaa locations
GPGVSALEEKNLGRIAQIIGPVLDVAFPPGKMPNIYNALVVKGRDTVGQQINVTCEVQQLLGNNRVRAVAMSATDGLMRGMEVINTGAPLSVPVGGATLGRIFNVLGEPIDNLGPVDTRTTSPIHRSAPAFIQLDTKLSIFETGIKVVDLLAPYRRGGKIGLFGGAGVGKTVLIMELINNIAKAHGGVSVFGGVGERTREGNDLYMEMKESGVINEQNIAESKVALVYGQMNEPPGARMRVGLTALTMAEYFRDVNEQDVLLFIDNIFRFVQAGSEVSALLGRMPSAVGYQPTLSTEMGSLQERITSTKEGSITSIQAVYVPADDLTDPAPATTFAHLDATTVLSRGLAAKGIYPAVDPLDSTSTMLQPRIVGEEHYETAQRVKQTLQRYKELQDIIAILGLDELSEEDRLTVARARKIERFLSQPFFVAEVFTGSPGKYVGLAETIRGFQLILSGELDSLPEQAFYLVGNIDEATAKAMNLEVXSNLKK

SEQ ID NO: 1865 - protein, 445 aa, Synechocystis sp. PCC 6803
MPKYDSHLKCSFCGKSQEQVRKLIAGPGVYICDECVELCNDILDEELLDVPPASTGERDGTGQKQKKSGQPRRRLTLEELPKPTAIKQYLDEYVIGQDEAKKVLSVAVYNHYKRLNLLERNQEIDPGDAVELQKSNILLVGPTGSGKTLLAQTLAKILEVPFAVADATTLTEAGYVGEDVENILLRLLQVADLDVEEAQRGIIYIDEIDKIARKSENPSITRDVSGEGVQQALLKMLEGTVANVPPQGGRKHPYQDCIQIDTSNILFICGGAFVGLEKVIEQRFGKKSMGFVRPGEGPSKEKRTADVLRQAEPDDLVKFGLIPEFIGRIPVMACLNPLDEDALIAILTQPRNAIVKQYQTLLGMDHVELDFQPDAVRAIATEAHRRKTGARALRGIVEELMLDVMYELPSREDLTHCLITREMVEKRSTAELLLHPSSLPKPESA

SEQ ID NO: 1866 - protein, 487 aa, Corynebacterium efficiens YS-314
MSPPHPQRVRLVDVERRTKIVCTLGPAVASADGILRLVQDGMDVARLNFSHGDHPDHEQNYKWVREATDKTGRAVGILADLQGPKIRLGRFKEGSTVWETGETVRITVDDVEGTHDRVSTTYKNLAKDARPGDRLLVDDGKVGLVCVSVEGNDVICEVTEGGPVSNNKGVSLPGMDISVPALSEKDIKDLRFALKLGVDFIALSFVRSPADVELVHAIMDEEGRRVPVIAKLEKPEAVAALESIVLAFDAIMVARGDLGVEVPLEEVPLVQKRAIQIARENAKPVIVATQMLDSMIENSRPTRAEASDVANAVLDGADAVMLSGETSVGKDPHNVVRTMSRIVRFAETDGRVPDLTHIPRTKRGVISYSARDIAERLNARALVAFTTSGDTAKRLARLHSHLPLLVFTPDPSVRSQLALTWGAQTFLCPKVDDTDGMMREVDRALLAMDEYQKDDMMVVVAGSPPGVTGNTNMIHVHLLGEDTRIPK

SEQ ID NO: 1867 - protein, 485 aa, Paepalanthus fasciculatus
TSSSTVLQMEERNIGRIAQIIGPVLDVVFSPGKMPNIYNALVVKGRDNADQQINVTCEVQQLLGNNRIRAVAMSATDGLTRGMEVIDTGSPLSVPVGGATLGRIFNVLGDPIDNLGPVDSSATSPIHRSAPAFIQLDTRLSIFETGIKVVDLLAPYRRGGKIGLFGGAGVGKTVLIMELINNIAKAHGGVSVFGGVGERTREGNDLYMEMKESGVINENNLAESKVALVYGQMNEPPGARMRVGLTALTMAEYFRDVNEQDVLLFIDNIFRFVQAGSEVSALLGRMPSAVGYQPTLSTEMGSLQERITSTKEGSITSIQAVYVPADDLTDPAPATTFAHLDATTVLSRGLAAKGIYPAVDPLDSTSTMLQPRIVGNEHYEIAQRVKQTLQRYKELQDIIAILGLDELSEEDRLTVARARKIERFLSQPFFVAEVFTGSPGKYVGLAETIRGFQLILSGELDSLPEQAFYLVGNIDEVTAKAMNLE

SEQ ID NO: 1868 - protein, 479 aa, Pasteurella multocida
MSRRLRRTKIVCTMGPSTERGNNLEKIIMAGANVVRMNFSHGTPEDHIGRAEKVREVAKKLGKTVAILGDLQGPKIRVSTFKDGKIFLNIGDKFVLDADLPKGEGTQEGVGLDYKTLPQDVVPGDILLLDDGRVQLKVLSTEGNKVFTEVTVGGPLSNNKGINKLGGGLSADALTEKDKNDILLAAKIGVDYLAVSFPRSSADLNYARELAEAAGLKAKIVAKVERAETVATTEAMDDIILASDVIMVARGDLGVEIGDPELVGVQKKLIRRARQLNRVVITATQMMESMISNPMPTRAEVMDVANAVLDGTDAVMLSAETAAGQYPAETVATMAKVCLGAEKMPSINVSRHRMDITFDSIEESVAMSAMYAANHMKGVAAIIAMTHTGRTALLMSRISSGLPIFALSRNQDALNLCALYRGVTPVHFDEVSRNSKGAAAAIRLLKEKGFLVSGDLVLLTQGDELLASGTNTCRTLVVE

SEQ ID NO: 1869 - protein, 489 aa, Phacelia grandiflora
GSGVSTLEKKNLGRIVQIIGPVLDVAFPPGKMPNIYNALVVKGRDTAGQPINVTCEVQQLLGNNRVRAVAMSATDGLTRGMEVIDTGAPLSVPVGGATLGRIFNVLGEPVDNLGPVDTRTTSPIHRSAPAFIQLDTKLSIFETGIKVVDLLAPYRRGGKIGLFGGAGVGKTVLIMELINNIAKAHGGVSVFGGVGERTREGNDLYMEMKESGVINEENIAESKVALVYGQMNEPPGARMRVGLTALTMAEYFRDVNEQDVLLFIDNIFRFVQAGSEVSALLGRMPSAVGYQPTLSTEMGSLQERITSTKAGSITSIQAVYVPADDLTDPAPATTFAHLDATTVLSRGLAAKGIYPAVDPLDSTSTMLQPRIVGEEHYETAQRVKETLQRYKELQDIIAILGLDELSEEDRLTVARARKIERFLSQPFFVAEVFTGSPGKYVGLAETIRGFQLILSGELDGLPEQAFYLVGNIDEATAKAMNLEMESNLK

SEQ ID NO: 1870 - protein, 268 aa, Xylella fastidiosa Ann-1
MHRIDETFRRLRAQSRKALIPFITAGDPSLEAAVPVMHALVRAGADVIELGVPFSDPMADGPVIQHSSERALQRGVGLAYVLQTVDVFRQSDAVTPVVLMGYLNPLEIYGIARFTQQALASGVDGVLLVDLPPEEADEIRAIFSAAGLALIVLASPTTSASRLATLSEVAQGYLYYVSFAGVTGADRLDAQSAGDRLRGLRAQTQVPVVVGFGIRDAASATVVAVDADGVVVGSALVTALSDAPDVDTACRRADAFLAPLRQALDAVK

SEQ ID NO: 1871 - protein, 253 aa, Chlamydia trachomatis
MSKLTQVFKQTKPCIGYLTAGDGGTSYTIEAAKALIRGGVDILELGFPFSDPVADNPEIQVSHDRALAENLTSETLLEIVEGIRAFNQEVPLILYSYYNPLLQRDLDYLRRLKDVGINGVCVIDLPAPLSHGEKSPFFEDLLAVGLDPILLISAGTTPERMSLIQEYARGFLYYIPYEATRDSEVGIKEEFRKVREHFDLPIVDRRDICDKKEAAHVLNYSDGFIVKTAFVHQTTMDSSVETLTALAQTVIPG

SEQ ID NO: 1872 - protein, 425 aa, Rickettsia prowazekii
MVVDADKKELICSFCSKKQHEVKKLIAGPAVFICDECIDLCTDIMKEESKVALKQITASIPTPQKICKILNDYVVGQDQAKKILAVAVYNHYKRLEYVQSGNNDVELNKSNILLIGPTGSGKTLLAQTLAKILDVPFTMADATSLTEAGYVGEDVENILLRLLISAEFNIAKAQKGIIYIDEVDKIARKSDNPSITRDVSGEGVQQALLKIMEGTVASVPPQGGRKHPQQDFVQLDTSNILFICGGAFMGIDRIIRSRTNHSSIGFAANINIDKEKSNNEILKSLEIEDLTKFGLIPEFIGRLPIITTLDELDKEALITILTKPKNAIVKQYQKQFELDDADLVIDYSALEAIAEKALVKKTGARGLRSILEHLLLDSMYKVAELKKQRVTITKEVVDGLIEPCMTSIISTKLNKKQPIIEDIPA

SEQ ID NO: 1873 - protein, 410 aa, Hordeum vulgare
MAAMWSPIIGLLLLLLPLGPSSAIKFPLEGNVYPVGHFYATLNIGEPAKPYFLDVDTGSNLTWLECHHPVHGCKGCHPRPPHPYYTPADGNLKVVCGSPLCVAVRRDVPGIPECSRNDPHRCHYEIQYVTGKSEGDLATDIISVNGRDKKRIAFGCGYKQEEPADSPPSPVDGILGLGMGKAGFAAQLKGHKMIKENVIGHCLSSKGKGVLYVGDFNPPTRGVTWAPMRESLFYYSPGLAEVFIDKQPIRGNPTFEAVFDSGSTYTHVPAQIYNEIVSKVRGTLSESSLEEVKGRALPLCWKGKKPFGSVNDVKNQFKALSLKITHARGTNNLDIPPQNYLFVKEDGETCLAILDASLDPVLKELNFILIGAVTMQDLFVIYDNEKKQLGWVRAQCDRVQELESVIDSRL

SEQ ID NO: 1874 - protein, 498 aa, Guettarda uruguensis
  unsure (1)..(498): unsure at all Xaa locations
XXXXXXXXXXXXXXXEKKNLGRIVQIIGPVLDVAFPPGKMPNIYNALVVKGRDTVGQPINVTCEVQQLLGNNRVRAVAMSATDGLTRGMEVIDTGAPLSVPVGGATLGRIFNVLGEPVDNLGPVDTRTTSPIHRSAPAFIQLDTKLSIFETGIKVVDLLAPYRRGGKIGLFGGAGVGKTVLIMELINNIAKAHGGVSVFGGVGERTREGNDLYMEMKESGVINEENIAESKVALVYGQMNEPPGARMRVGLTALTMAEYFRDVNEQDVLLFIDNIFRFVQAGSEVSALLGRMPSAVGYQPTLSTEMGSLQERITSTKEGSITSIQAVYVPADDLTDPAPATTFAHLDATTVLSRGLAAKGIYPAVDPLDSTSTMLQPRIVGEEHYETAQRVKQTLQRYKELQDIIAILGLDELSEEDRLTVARARKIERFLSQPFFVAEVFTGSPGKYVGLAETIRGFQLILSGELDGLPEQAFYLVGNIDEATAKAMNLEMENNLKK

SEQ ID NO: 1875 - protein, 498 aa, Cyrtandra hawaiensis
  unsure (1)..(498): unsure at all Xaa locations
XXXXXXXXXXXXXXXXXXNLGRIVQIIGPVLNVAFPPGKMPNIYNALVVKGRNTVGQPINVTCEVQQLLGNNRVRAVAMSATDGLMRGMDVIDTEAPLSVPVGGATLGRIFNVLGEPVDNLGPVDTRTTFPIHRSAPAFIQLDTKLSIFETGIKVVDLLAPYRRGGKIGLFGGAGVGKTVLIMELINNIAKAHGGVSVFGGVGERTREGNDLYMEMKESGVINEENIAESKVALVYGQMNEPPGARMRVGLTALTMAEYFRDVNEQDVLLFIDNIFRFVQAGSEVSALLGRMPSAVGYQPTLSTEMGSLQERITSTKEGSITSIQAVYVPADDLTDPAPATTFAHLDATTVLSRGLAAKGIYPAVDPLDSTSTMLQPRIVGEEHYETAQRVKQTLQRYKELQDIIAILGLDELSEEDRLTVARARKIERFLSQPFFVAEVFTGSSGKYVDLAETIRGFQXILSGELDGLPEQAFYLVGNIDXVTTKAMNLEMESNLKK

SEQ ID NO: 1876 - protein, 477 aa, Methanosarcina barkeri
MQIPDHKTKIVCTIGPASSSEEVIRKLVLAGMNVARINFSHGSFESHSEVIQRVRKVAEELDRTVAILADLPGPKIRIGKLEKEPIMLHKGNSVTLTVAETTGNETRIPVSYKQLPESVVPGSLIYLSDGFIQLRCLEVSGKDVLCEVLIGGQLYSHKGLNLPGAKILVDSVTGKDLEILGFALSKGIDTFSISFIESAEDIRNVRNFAAARGKSVYIVSKIERRQAVENIQDILKETDALMIARGDLGVEIPIQEVPSVQKELIHSAKLLGIPVITATQMLASMTDNIRPTRAEATDVANAILDGTDAVMLSEETAVGNYPVEAVEMMAKIAKTTEDWRSGTKWGLDAIIKGITARDMSVDEVITLQVHEALQKLPVAAVLTPTRSGATPRRISRFKPDTWILAFSRVPRTCGFLSLSYGVYPITVNENIESWEKETTEKAKDLGFVKSGEIVIFTQGPSSGSPGGTNMLKILTLK

SEQ ID NO: 1877 - protein, 162 aa, Triticum aestivum
MALALKASLSPSSSPLSSPQRSRARAAVAVATPGRPVVARALAAASVDPAVVMPTARRLAVRARAAATLLAPAPAGKSGMSVAKAMSQARHKGKTAFIPYITAGDPDLATTAEALRLLDTLGADVIEVGMPFSDPYADGPVIQASAARALSAGVTTDAVMSM

SEQ ID NO: 1878 - protein, 501 aa, Xanthomonas axonopodis pv. citri str. 306
MCVKFRGFYREAIMKERQRRTKILATLGPATDAPGVLDTLFKAGVNVVRLNFSHGDPSGQAKRAAEVRAAAARVGAEVGILADLPGPKIRIERFAEGKIKLTMGDRFDLVADANAPAGDQTQVGVSYLGLPQDVTAGDVLLLDDGLMQLQVTDVQGARIVTKVLNDGVLSDRKGLNKQGGGLSLGALTERDKELIGIVAKIGVDFIAVSFCRNAQDMHDARQIAQQHGCDAQLVSKIERTEAIENLVEIVEASDVVMVARGDLGVEIGDAELPGLQKKIIRESLAQNKVVITATQMLQSMVESPIPTRAEVLDVANAVIDGTDAVMLSAETAAGAYPVRAVEAMARICLGAEHQFEFDTDFEAAQRNLQRADQAIAMATMFLSEHIGLGGVVALTESGGTPRFLSRFRSNMPIYAFTRHDGARRQMAMMRGVFPISFDSRGLTPREAARAAIRLLVENERMGPGDRVVFTSGEHMETHGATNTLRLLEVGEDGRATGLGEL

SEQ ID NO: 1879 - protein, 402 aa, Coleochaete orbicularis
LLGDNKVRAVSMSATDGLMRGMDVIDTGAPLSVPVGEATLGRIFNVLGEPVDELGPVDATTTFPIHRSAPAFTQLDTKLSIFETGIKVVDLLAPYRRGGKIGLFGGAGVGKTVLIMELINNIAKAHGGVSVFGGVGERTREGNDLYMEMKESKVINEENISESKVALVYGQMNEPPGARMRVGLTALTMAEYFRDVNKQDVLLFIDNIFRFVQAGSEVSALLGRMPSAVGYQPTLSTEMGTLQERITSTKEGSITSIQAVYVPADDLTDPAPATTFAHLDATTVLSRGLAAKGIYPAVDPLDSTSTMLQPWIVGQEHYETAQGVKQTLQRYKELQDIIAILGLDELSEEDRLTVARARKIERFLSQPFFVAEVFTGSPGKYVSLVETIKGFQLILSGDLDAL

SEQ ID NO: 1880 - protein, 262 aa, Thermoanaerobacter tengcongensis
MNRIDRRFDDLKKEGKKALITFITAGDPDIDTTYDIVLALEEAGADIIELGIPYSDPLADGPTIQASSQRALAKGIKIKDIMDLVMRIREKSDIPIVYLVYYNSVFKYGIEKFLEDSKNAGVDGLIIPDLPLEERKEVLDVADKYEIYLIPLVAPTSKERIKGITENGKGFVYCVTLTGVTGAREEITTDLEEYMRLVSSYTSMPKALGFGISGPEMARKLKSLSDGIVVGSAIVERIAKGYNRCEMLKEVKEFVLSLREVL

SEQ ID NO: 1881 - protein, 242 aa, Shigella dysenteriae
LKERKEGAFVPFVTLGDPGIEQSLKIIDTLIEAGADALELGIPFSDPLADGPTIQNATLRAFAAGVTPAQCIEMLALIRQKHPTIPIGLLMYANLVFNKGIDEFYAQCEKVGVDSVLVADVPVEESAPFRQAALRHNVAPIFICPPNADDDLLRQIASYGRGYTYLLSRAGVTGAENRAALPLNHLVAKLKEYNAAPPLQGFGISAPDQVKAAIDAGAAGAISGSAIVKIIEQHINEPEKML

SEQ ID NO: 1882 - protein, 495 aa, Liriope muscari
MRTNPTTSGSAVSTLDEKNLGRIAQIIGPVLDVVFPPGKMPNIYNALVVKGRDTVGQQINVTCEVQQLLGNNRVRAVAMSATDGLTRGMEVIDMGAPLSVPVGGATLGRIFNVLGEPVDNLGPVDTRTTSPIHRSAPAFIQLDTKLSIFETGIKVVDLLAPYRRGGKIGLFGGAGVGKTVLIMELINNIAKAHGGVSVFGGVGERTREGNDLYMEMKESGVINEKNIAESKVALVYGQMNEPPGARMRVGLTALTMAEYFRDVNEQDVLLFIDNIFRFVQAGSEVSALLGRMPSAVGYQPTLSTEMGSLQERITSTKEGSITSIQAVYVPADDLTDPAPATTFAHLDATTVLSRGLAAKGIYPAVDPLDSTSTMLQPGIVGEEHYETAQKVKQTLQRYKELQDIIAILGLDELSEEDRLTVARARKIERFLSQPFFVAEVFTGSPGKYVGLAETVRGFQLILSGELDSLPEQAFYLVGNIDEATAKAMNLEGEKK

SEQ ID NO: 1883 - protein, 473 aa, Jasminum polyanthum
PGRIVQFIGPVLDVAFPSGKMLNIYNALVVQGRDTVGQAINVTCEVQQLLGNNQVRAVAMSATDGLMRGMEVIDTGAPLSVPVGGATLGRIFNVLGEPVDELGPVDTRTTSPIHRSAPAFIQLDTKLSIFETGIKVVDLLAPYRRGGKIGLFGGAGVGKTVLIMELINNIAKAHGGVSVFGGVGERTREGNDLYMEMKESGVINEENIAESKVALVYGQMNEPPGARMRVGLTALTMAEYFRDVNEQDVLLFIDNIFRFVQAGSEVSALLGRMPSAVGYQPTLSTEMGTLQERITSTKEGSITSIQAVYVPADDLTDPAPATTFAHLDATTVLSRVLAAKGIYPAVDPLDSTSTMLQPRIVGEEHYKIAQRVKQTLQRYKELQDIIAILGLDELSEEDRLTVARARKIERFLSQPFFVAEVFTGSPGKYVGLAETIRGFQLILSGELDGLPEQAFYLVGNIDEATAKAMNLEM

SEQ ID NO: 1884 - protein, 237 aa, Cichorium intybus x Cichorium endivia
GVCYGRVEGLSSQQDVVNLYKNNSITRMRIYQPNQAILQGLKGTNIELVIGIPNDALESLSNQNTANTWVRDNIQNYPDVRFRYVAVGNEVDPDNGNSQYVNFVLPAMQNVQNAINAASLGNQIKVSTATYSGLLGVSYPPGNGAFRDTVREFIEPIVEFLSENNSPMLVNIYPYFASIGNPNSNLPYALFTAPGTILSDNGRRYSNLFDAIIDAHYAAQASLGGENVEIVVSESGC

SEQ ID NO: 1885 - protein, 1013 aa, Arabidopsis thaliana
MEEVQPPVTPPIEPNGKRSEASLLDICEKVLSLDGSTCDEALKLFTETKRILSASMSNIGSGTREEVERFWFAFILYSVKRLSVRKEADGLSVSGDNEFNLCQILRALKLNIVDFFKELPQFVVKAGSVLGELYGADWENRLQAKEVQANFVHLSLLSKYYKRGFREFFLTYDANAEKNSANSSTYLLDSYRFGWLLFLALRNHAFSRFKDLVTCSNGVVSILAILIIHVPCRFRNFSIQDSSRFVKKGDKGVDLVASLCKIYDASEDELRIVIDKANNLVETILKKKPSPASECQTDKLDNIDPDGLTYFEDLLEETSISTSLITLEKDYYDGKGELDERVFINEEDSLLGSGSLSAGAVNITGVKRKIDALSSPARTFISPLSPHKSPAAKTNGISGATKLAATPVSTAMTTAKWLRTVISPLLPKPSPGLEHFLKSCDRDITNDVTRRAHIILEAIFPNSSLGAQCGGGSLQAVDLMDDIWAEQRRLEACKLYYRVLEAMCKAEAQILHANNLNSLLTNERFHRCMLACSAELVLATHKTITMLFPAVLERTGITAFDLSKVIESFIRHEDSLPRELRRHLNSLEERLLESMVWEKGSSMYNSLIVARPSLALEINQLGLLAEPMPSLDAIAALINFSDGANHASSVQKHETCPGQNGGIRSPKRLCTDYRSILVERNSFTSPVKDRLLALGNVKSKMLPPPLQSAFASPTRPNPGGGGETCAETGINIFFTKINKLAAVRINGMVERLQLSQQIRESVYCFFQHVLAQRTSLLFSRHIDQIILCCFYGVAKISQMSLTFREIIYNYRKQPQCKPLVFRSVYVDALQCRRQGRIGPDHVDIITFYNEIFIPAVKPLLVELGPVRNDRAVEANNKPEGQCPGSPKVSVFPSVPDMSPKKVSAVHNVYVSPLRGSKMDALISHSTKSYYACVGESTHAYQSPSKDLSAINNRLNNSSSNRKRTLNFDAEAGMVSDSMVANSLNLQNQNQNQNGSDASSSGGAAPLKTEPTDS

SEQ ID NO: 1886 - protein, 480 aa, Yersinia pestis CO92
MSRRLRRTKIVTTLGPATDRDNNLEKIIAAGANVVRLNFSHGSAEDHELRANKVREIAARLGRHVAILGDLQGPKIRVSTFKEGKVFLNINDKFLLDANMAKGEGDKNKVGIDYKGLPADVVPGDILLLDDGRVQLKVVEVQGMKVFTEVTVGGPLSNNKGINKLGGGLSAEALTEKDKADIVTAAKIGVDFLAVSFPRTGEDLHYARRLARDAGCNAQIVAKVERAEAVATDEAMDDIILASDVVMVARGDLGVEIGDPELVGIQKKLIRRARQLNRAVITATQMMESMITNPMPTRAEVMDVANAVLDGTDAVMLSAETAAGQYPAETVAAMARVCLGAEKIPSINVSKHRLDVQFDNVEEAIAMSTMYAANHLKGITAIIAMTESGRTALMMSRISSGLPIFAMSRHDHTLNLTAIYRGVTPVYCDPHTDGVLAATEAVKRLQDKGFLVSGDLVIVTQGDVMGTIGTTNTSRIIRVE

SEQ ID NO: 1887 - protein, 370 aa, Triticum aestivum
MGWLSCCKRSNGKKKKKDTTWRIFSLKELQLATNNFNYDNKLGEGGFGSVYWGQLWDGSQIAVKRLKSWSNKAEKEFAVEVEVLARVRHKSLLSLRGYCAEGQERLIVYDYMQNLSLHSHLHGQHAAECHLGWERRMNIAIDSAEGIAYLHHHAIPHIIHRDVKASNVLLDANFQARVADFGFAKLIPDGATHVTTKVKGTLGYLAPEYAMLGKAKDSCDVYSFELLLLQLASANARACQRKEASREDIPEWALPLTREQKFKEMADPKLGDSFAEAEVNRMVLVGLACTQTKPEQRPVMSEVVEMLKGESAEKFSILENDDLFKPQQTTSSVQGTSGPCSSDAITEEKESKEDTIEEATDSSETVPSAR

SEQ ID NO: 1888 - protein, 416 aa, Leuconostoc mesenteroides subsp. mesenteroides ATCC 8293
MANTPNFEEEIHCSFCGKSASEVKKIVAGPNDVYICNECVALAEGIIEEELTVDRAAEVLSLPTPHEIVNELNDYVIGQEDAKKTLAVAVYNHYKRINENVAPTLDVELQKSNIALMGPTGSGKTYLAQSLARILNVPFAIADATTLTEAGYVGEDVENIILKLLQAADFDVAAAERGIIYVDEIDKIAKKSENVSITRDVSGEGVQQALLKMLEGTTASVPPQGGRKHPQQELIQVNTTNILFIVGGAFAGIDTIIKERLGERVIGFGSDANENAEALNDDNILHHVQPEDMTKFGLIPEFIGRLPIVTVLDELTISDLTRILTEPKNALIKQYTALLGLDDVELEFQPDALDAMASVAIKRHTGARGLRSIIENVMKDVMFDIPSRDDVAKVIITKASVEQGEQPELQLKKVSE

SEQ ID NO: 1889 - protein, 498 aa, Phyllonoma laticuspis
  unsure (1)..(498): unsure at all Xaa locations
XXXXXXXXXSGVSTLEKQNLGRIAQIIGPVLDVTFRPGKMPNIYNALVVKGRDTAGQPINVTCEVQQLLGNNRVRAVAMSATDGLMRGMEVIDTGAPXSVPVGGATLGRIFNVLGEPVDNLGPVDTXTTSPIHRSAPAFIQLDTKLSIFETGIKVVDLLAPYRRGGKIGLFGGAGVGKTVLIMELINNIAKAHGGVSVFGGVGERTREGNDLYMEMKESGVINEQNIAESKVALVYGQMNEPPGARMRVGLTALTMAEYFRDVNEQDVLLFIDNIFRFVQAGSEVSALLGRMPSAVGYQPTLSTEMGSLQERITSTKEGSITSIQAVYVPADDLTDPAPATTFAHLDATTVLSRGLAAKGIYPAVDPLDSTSTMLQPRIVGEEHYETAQKVKQTLQRYKELQDIIAILGLDELSEEDRLTVSRARKIERFLSQPFFVAEVFTGSPGKYVGLAETIRGFQLILSGELDGLPEQAFYLVGNIDEATAKAMNLEMESNLKK

SEQ ID NO: 1890 - protein, 301 aa, Cyanidium caldarium
MGITPTALEKTDKHTLVNLQEEFNKTKIQEVLDDLNQELIGLKPVKNRIREIAALLLVDRLRQKVGLSSSNPGLHMSFTGPPGTGKTTVATKMADILYKLNYIKKGHLVTVTRDDLVGQYIGHTAPKTKEVLKKAMGGVLFIDEAYYLYKPDNERDYGSEAIEILLQVMENQREDLVIIFAGYKEKMDKFYASNPGLASRVANHVDFPEYRPEELLKIAEMMLQEQQYQLTKEAELVFLDYIKKRMLQPHFANARSVRNAIDRARMRHANRIFNLSSKIVTKSNLTTIQAEDILKSRLFNT

SEQ ID NO: 1891 - protein, 180 aa, Glycine max
FGSRKLFDEYKIDYIIHGDDPCVLPDGTDAYAHAKKAGRYKQIKRTEGVSSTDIVGRMLLCVRERSITEKNHNHSSLQRQFSNGHSPKFEAGASAATASGTRISHFLPTSRRIVQFSNGRGPGPDSHIVYIDGAFDLFHAGHVEILRLARDLGDFLLVGIHTDQTVSATRGSHRPIMNLY

SEQ ID NO: 1892 - protein, 619 aa, Mycobacterium tuberculosis H37Rv
MSRMVDTMGDLLTARRHFDRAMTIKNGQGCVAALPEFVAATEADPSMADAWLGRIACGDRDLASLKQLNAHSEWLHRETTRIGRTLAAEVQLGPSIGITVTDASQVGLALSSALTIAGEYAKADALLANRELLDSWRNYQWHQLARAFLMYVTQRWPDVLSTAAEDLPPQAIVMPAVTASICALAAHAAAHLGQGRVALDWLDRVDVIGHSRSSERFGADVLTAAIGPADIPLLVADLAYVRGMVYRQLHEEDKAQIWLSKATINGVLTDAAKEALADPNLRLIVTDERTIASRSDRWDASTAKSRDQLDDDNAAQRRGELLAEGRELLAKQVGLAAVKQAVSALEDQLEVRMMRLEHGLPVEGQTNHMLLVGPPGTGKTTTAEALGKIYAGMGIVRHPEIREVRRSDFCGHYIGESGPKTNELIEKSLGRIIFMDEFYSLIERHQDGTPDMIGMEAVNQLLVQLETHRFDFCFIGAGYEDQVDEFLTVNPGLAGRFNRKLRFESYSPVEIVEIGHRYATPRASQLDDAAREVFLDAVTTIRNYTTPSGQHGIDAMQNGRFARNVIERAEGFRDTRVVAQKRAGQPVSVQDLQIITATDIDAAIRSVCSDNRDMAAIVW

SEQ ID NO: 1893 - protein, 269 aa, Azotobacter vinelandii
MSRLQTRFAELKQADRAALVTFVTAGDPDYETSLAILKGLPEAGADVIELGMPFTDPMADGPAIQLANIRALGAGQNLVKTLRMVRAFREGDRTTPLVLMGYFNPIHYYGVERFIAEAREAGVDGLIVVDLPPEHNEDLCDPAQAAGLDFIRLTTPTTDDKRLPRVLAGSSGFVYYVSVAGVTGAHAASLEHVEQAVARLRRHTDLPLCIGFGIRSPEHAGSVARLAEGVVVGSALVDRIAKAGSKEQAVGDVLGLCRELAEGVRRARR

SEQ ID NO: 1894 - protein, 510 aa, Solanum tuberosum
MANIDIAGIMKDLPNDGRIPKTKIVCTLGPSSRTVPMLEKLLRAGMNVARFNFSHGTHEYHQETLDNLKIAMQNTQILCAVMLDTKGPEIRTGFLTDGKPIQLKEGQEITVSTDYTIKGNEEMISMSYKKLVVDLKPGNTILCADGTITLTVLSCDPPSGTVRCRCENSATLGERKNVNLPGVVVDLPTLTEKDKEDILEWGVPNNIDMIALSFVRKGSDLVNVRKALGPHAKRIQLMSKVENQEGVINFDEILRETDSFMVARGDLGMEIPVEKIFLAQKMMIYKCNLAGKAVVTATQMLESMIKSPRPTRAEATDVANAVLDGTDCVMLSGESAAGAYPELAVKIMSRICIEAESSLDNEAIFKEMIRCTPLPMSPLESLASSAVRTANKARAKLIVVLTRGGSTAKLVAKYRPAVPILSVVVPVLTTDSFDWSISDETPARHSLVYRGLIPLLGEGSAKATDSESTEVILEAALKSAVTRGLCKPGDAVVALHRIGSASVIKICVVK

SEQ ID NO: 1895 - protein, 495 aa, Brimeura amethystina
MRINPTTSSSAVSTLEEKNLGRIAQIIGPVLDVVFPPGKMPNIYNALVVKGRDTVGQQINVICEVQQLLGNNRVRAVAMSATDGLTRGMEVIDTGAALSVPVGGATLGRIFNVLGEPVDNLGPVDTRTTSPIHRSAPAFIQLDTKLSIFETGIKVVDLLAPYRRGGKIGLFGGAGVGKTVLIMELINNIAKAHGGVSVFGGVGERTREGNDLYMEMKESGVINEKNIAESKVALVYGQMNEPPGARMRVGLTALTMAEYFRDVNEQDVLLFIDNIFRFVQAGSEVSALLGRMPSAVGYQPTLSTEMGSLQERITSTKEGSITSIQAVYVPADDLTDPAPATTFAHLDATTVLSRGLAAKGIYPAVDPLDSTSTMLQPRIVGEEHYETAQKVKQTLQRYKELQDIIAILGLDELSEEDRLTVARARKIERFLSQPFFVAEVFTGSPGKYVGLAETIRGFQLILSGELDSLPEQAFYLVGNIDEATAKAMNLEGEKK

SEQ ID NO: 1896 - protein, 490 aa, Cuscuta reflexa
MRINPPTYGSEISSIEKKNRGHIVQIIGPVLDVAFPPGKMPNIYNALIVKGRDTEQMNVTCEVQQLLGNNRVRAVAMNDTDGLMRGMEVIDTGTPITVPVGGSTLGRIFNVLGEPVDNLGPVDTNTTFTIHRSAPAFIQLDTKLSIFETGIKVVDLLAPYRRGGKIGLFGGAGVGKTVLIMELINNIAKAHGGVSVFGGVGERTREGNDLYMEMKESGVINEKNITESKVALVYGQMNEPPGARMRVGLTALTMAEYFRDVNEQDVLLFIDNIFRFVQAGSEVSALLGRMPSAVGYQPTLSTEMGSLQERITSTKEGSITSIQAVYVPADDLTDPAPATTFAHLDATTVLSRGLAAKGIYPAVDPLDSTSMMLQPRLVGEEHYETAQKVKQTLQRYKELQDIIAILGLDELSEEDRLTVARARKIERFLSQPFFVAEVFTGSPGKYVGLAETIIGFTLILSGELDSLPEQAFYLVGNINEATEKAMNLKT

SEQ ID NO: 1897 - protein, 1324 aa, Oryza sativa (japonica cultivar-group); identical to SEQ ID NO: 1711

SEQ ID NO: 1898 - protein, 242 aa, Shigella flexneri
LKERKEGAFVPFGTLGDPGIEQSLKIIDTLIEAGADALELGIPFSDPLADGPTIQNATLRAFAAGVTPAQCFEMLALIRQKHPTIPIGLLMYANLVFNKGIDEFYAQCEKVGVDSVLVADVPVEESAPFRQAALCHNVAPIFICPPNADDDLLRQIASYGRGYTYLLSRAGVTGAENRSALPLNHLVAKLKEYNAAPPLQGFGISAPDQVKAAIDAGAAGAISGSAIVKIIEQHINEPEKML

SEQ ID NO: 1899 - protein, 110 aa, Glycine max
CNRAAAHQALDQIADAIADCSVAIALDGNYAKAISRRATLHEMVRDYEQAACDLKRLIAVLETQSNERAKQSDSPSGSNAVKELRQAHQRLLSVEDQAKKGAPLDVYLIL

SEQ ID NO: 1900 - protein, 480 aa, Buglossoides purpurocaerulea
  unsure (1)..(480): unsure at all Xaa locations
LEKKNLGRVVQIIGPVLDVAFSPGKMPNIYNALVVKGRDTVGQPINVTCEVQQLLGNNRVRAVAMSATDGLTRGMEVIDTGAALSVPVGGATLGRIFNVLGEPVDNLGPVDTRTTSPIHRSAPAFIQLDTKLSIFETGIKVVDLLAPYRRGGKIGLFGGAGVGKTVLIMELINNIAKAHGGVSVFGGVGERTREGNDLYMEMKESGVINEENIAESKVALVYGQMNEPPGARMRVGLTALTMAEYFRDVNEQDVLLFIDNIFRFVQAGSEVSALLGRMPSAVGYQPTLSTEMGTLQERITSTKAGSITSIQAVYVPADDLTDPAPATTFAHLDATTVLSRGLAAKGIYPAVDPLDSTSTMLQPRIVGEEHYETAQRVKETLQRYKELQDIIAILGLDELSEEDRLTVARARKIERFLSQPFFVAEVFTGSPGKYVGLAETIRGFQLILSGELDGLPEQAFYLVGNIDEATAXAMNLEMES

SEQ ID NO: 1901 - protein, 960 aa, Arabidopsis thaliana
MSPAAVEIGSPVEKVSSVLNPMENFSAFFPESVHSHDQRTMGSSFSFGFGAGSGQTTKTRHKPRLVKLRKNGREVKKPSFSGEILSGFNPFAPPGSLHMNSGNDRDAGQSPGDKCFVFGASGNSSGAKSSPGNATIASLSDEEEFSTPIGDSELDSESIKEHSNGVRGKVDNDRENIRPCSESTIFDATNGFRFDGGVNGSWKSVENPDAVKEFFRRQNGMDKASASKSCSKSNSVQYAHGKNRDDPELNLLADMEKLNISDSRVHGGSDYEEASKSNKTPVFTFSSFGKVDPICKEGAATSEPYSFSSNGFQQSNNASGENPTFHSQTTYGNNLTNTSFATKTFFDDFKVPEWDPSLLKDSLFPEVDRNPVHARSNRSSKDKRSKKVKEKMKQGEPDRCNGQTAEGIEAQEKLNSPGYCSPMDYSPYQGDKTSNQFPTETPLAPSHSREHIDSRSSNDFKVASARDSSLFTAEDHGSTCIPNFSFSASTSQETIRHKKLQAVKKYRRKVNNSLPKSNLNATMRNNQENQPVNTGQAKQDSGSTSMMPDVCEVWRLRGNQAYKNGYMSKAEECYTHGINSSPSKDNSEYSVKPLALCYGNRAAARISLGRLREAISDCEMAASLDPSYIKAYMRAANCHLVLGELGSAVQYFNKCMKSTSSVCLDRRTTIEAAEGLQQAQRVADFTSCASIFLEKRTPDGASDALVPIANALSISSCSDKLLQMKAEALFMNAGNEAVRDRKYMEAVEQYTAALSRNVDSRPFAAICFCNRAAANQALVQIADAIADCSLAMALDENYTKAVSRRATLHEMIRDYDQAASDLQRLISILVKQSDKTKTPETSVDRASSRKELKQARQRLSVMEEKSKEGIHLDFFLIMGVKTSDSAADIKKAYRKAALRHHPDKAAQILVRSESEGPWLKEILEEVHKGADRLFKMIGEAYSVLSDPTKVWFLAYYAVKP

SEQ ID NO: 1902 - protein, 231 aa, Streptomyces avermitilis MA-4680
MSTLGTTSVVFDLDGTLVDSEPNYYEAGRHLLAEQGVTDFTWADHEQYVGISTQESLELWKERYGVEAPLDDLLADMNRRYLALARASTPVYPEMRKFVELLAGEGVPMAVASGSSPEAIEAILTGTGLASWLTTVVSADEVARGKPAPDVFLEAARRLGVSPADCVVLEDAAPGAAAAHAARMRCIAIPYVAAQADDPAFATAGLLVRGGQTEFTARAAYEWLARSTPSS

SEQ ID NO: 1903 - protein, 585 aa, Thermus aquaticus
MIQGVIQKIAGPAVIAKGMLGARMYDICKVGEEGLVGEIIRLDGDTAFVQVYEDTSGLKVGEPVVSTGLPLAVELGPGMLNGIYDGIQRPLERIREKTGIYITRGVVVHALDREKKWAWTPMVKPGDEVRGGMVLGTVPEFGFTHKILVPPDVRGRVKEVKPAGEYTVEEPVVVLEDGTELKMYHTWPVRRARPVQRKLDPNTPFLTGMRILDVLFPVAMGGTAAIPGPFGSGKTVTQQSLAKWSNADVVVYVGCGERGNEMTDVLVEFPELTDPKTGGPLMHRTVLIANTSNMPVAAREASIYVGVTIAEYFRDQGFSVALMADSTSRWAEALREISSRLEEMPAEEGYPPYLAARLAAFYERAGKVITLGGEEGAVTIVGAVSPPGGDMSEPVTQSTLRIVGAFWRLDASLAFRRHFPAINWNGSYSLFTSALDPWYRENVAEDYPELRDAISELLQREAGLQEIVQLVGPDALQDAERLVIEVGRIIREDFLQQNAYHEVDAYCSMKKAYGIMKMILAFYKEAEAAIKRGVSIDEILQLPVLERIGRARYVSEEEFPAYFEEAMKEIQGAFKAGLKGERWTF

SEQ ID NO: 1904 - protein, 526 aa, Aspergillus niger
MAASSSLDHLSNRMKLEWHSKLNTEMVPSKNFRRTSIIGTIGPKTNSVEKINSLRTAGLNVVRMNFSHGSYEYHQSVIDNAREAAKTQVGRPLAIALDTKGPEIRTGNTPDDKDIPIKQGHELNITTDEQYATASDDKNMYLDYKNITKVISPGKLIYVDDGILSFEVLEVVDDKTIRVRCLNNGNISSRKGVNLPGTDVDLPALSEKDIADLKFGVRNKVDMVFASFIRRGSDIRHIREVLGEEGKEIQIIAKIENQQGVNNFDEILEETDGVMVARGDLGIEIPAPKVFIAQKMMIAKCNIKGKPVICATQMLESMTYNPRPTRAEVSDVANAVLDGADCVMLSGETAKGNYPNEAVKMMSETCLLAEVAIPHFNVFDELRNLAPRPTDTVESIAMAAVSASLELNAGAIVVLTTSGKTARYLSKYRPVCPIVMVTRNPAASRYSHLYRGVWPFLFPEKKPDFNVKVWQEDVDRRLKWGINHALKLGIINKGDNIVCVQGWRGGMGHTNTVRVVPAEENLGLAE

SEQ ID NO: 1905 - protein, 478 aa, Bartonella henselae
MKRARKVKIIATLGPSSFSISMIEKLFMAGADVFRLNMSHTDRETMVDLVQRIRKVEKTVRRPIGILVDLQGPKLRVGCFDKGQEDLRIGQSFTLDDRDILGDAQRVFFPHGEVLAAIKPGDRLLIDDGKLELLAQVCDGHSVQCLVVAGNRISDRKGVSLPDTVLPFGPMTLKDKADLQAVLEQPVDWVALSFIQRPEDIIAVRALTKSKVSLMAKIEKPQALEHIEEIIDVADGIMIARGDLGVEMPLERVPAIQMELIKACRLAGKPVVVATQMLESMITSSVPTRAEVSDVATAVYTGTDAVMLSAESASGRYPEEAVLMMDRIAQQIEQDQTYAAQVGAQHPAPESTGTDAISLAARQIAETLQLTAIVAYTASGTTGVRTSRERPNRPIIALSPIVKTARRLALVWGLHCVVTEDARDLEDMVDRAAAIAFQEGFCQGGDRFLVTAGVPLGTPGATNLLRIASVSQDGTKGV

SEQ ID NO: 1906 - protein, 271 aa, Burkholderia multivorans
MSRIQQTFAALAQQGRKGLIPFITAGDPDPAKTVEFMHALAAGGADVIELGVPFSDPMADGPVIQRSSERALARGVTLKHVLADVKRFRETNQTTPVVLMGYANPIERHGVDAFAADARAAGVDGVLVVDYPPEEAAVFAEKMRAAGIDPIFLLAPTSTDARIAEVGKIASGYVYYVSLKGVTGAGNLDVSSIAGKIPAIKSRVPVPVGVGFGIRDAETARAVAEVSDAVVIGSRLVQLLESAAPEGAVAALQAFIAELRAALDGAANTAR

SEQ ID NO: 1907 - protein, 211 aa, Triticum aestivum
YIPRLSQSEFIGPYWKFTKSFSQPFSVGSRFKMRYESEDAAERRYTGIITGTGDADPMWRGSKWKCLLVRWDDDGELGRPNRVSPWEIELTSSASGSHLAAPTSKRMKPYLPHANPEFTVPHGGGRPDFAESAQVRKVLQGQELLGYRTHDGTAVATSQPCEARNLQYIDERGCSNNGSNNVLRGVPSHGVKTPLGIPYHCSGFGESQRFQ

SEQ ID NO: 1908 - protein, 264 aa, Gerbera hybrid cv. 'Terra Regina'
MENSDVLELDFSCVDRSMSFPDDTGDMSPQRKMGKGKIEIKRIENTTNRQVTFCKRRNGLLKKAYELSVLCDAEVALIVFSSRGRLYEYANNSVKGTIDKYKKACLDPPTSGTVAEANTQYYQQEAAKLRQQIANLQNQNRQFYRNIMGESLGDMPVKDLKNLEGKLEKAISRIRAKKNELLFAEIEYMQKRELELHNSNQFLRAKIVENERAQQHHMSLMPGSSDYELVTPHQPFDGRNYLQTNDLQPNNDYSCQDQTPLQLV

SEQ ID NO: 1909 - protein, 266 aa, Lactobacillus casei
MLMSKLADVFKNHKVFIPFIVADDPDFETTVKNVVALAKGGADIVELGIPFSDPVADGPVIQAADLRAFAANVRTKTVFDIVEAARKETAVPIVFLTYLNIVFKYGYDAFLKRCADLNVAGLVIPDLPYESRDEIVPIAEKYGIDIIPLITPTSGHRIEKIAKSASGFIYVVSSMGITGERDEFFAGLKALVAEIKQYTNVPTAIGFGIHTPEQAQTMAGIADGVIIGSAIVDLVAKEKQQAPAAIEKFTKQIRVAVDAKKQISVK

SEQ ID NO: 1910 - protein, 585 aa, Enterococcus faecalis V583
MKKTKIVCTIGPASESVDMLVNLINAGMNVCRLNFSHGDYEEHGARIKNIREAVKITGKRVAILLDTKGPEIRTNDMENGAITMKIGDSVRISMTEVLGTNEKFSITYPELINDVNVGSHILLDDGLIDLEVTDIDRDANEIVTVVKNEGVLKNKKGVNVPGVSVNLPGITEKDANDIRFGIGQGIDFIAASFVRRASDVLEITKILEEENATHIQIIPKIENQEGIDNIDEILKVSDGLMVARGDMGVEIPTEDVPVVQKALIKKCNALGKPVITATQMLDSMQRNPRPTRAEANDVANAIYDGTDAVMLSGETAAGDYPLEAVQTMARIAVRTEETLVNQDSFALKLYSKTDMTEAIGQSVGHTARNLGIQTIVAATESGHTARMISKYRPKAHIVAITFSEQKARSLSLSWGVYATVADKPSSTDEMFNLASKVSQEEGYASEGDLIIITAGVPVGEKGTTNLMKIQMIGSKLVQGQGVGEEAIIAKAVVAATAEEAVAKATEGAILVTKTTDKEYMPAIEKASALVVEEGGLTSHAAVVAIAQNIPVIVGAADATSLINNDEVITVDPRRGIVYRGATTAI

SEQ ID NO: 1911 - protein, 138 aa, Ipomoea nil
HAAELTAGFYNVAGRDGYRPIARMLARHHATLNFTCLEMRDSEQPAEAKSAPQELVREVLSSGWKEYIDVAGENALPRYDATAYNQMLLNVRPNGVNLNGPPKLKMSGLTYLRLSDDLLQTDNFELFKKFVKKMHADL

SEQ ID NO: 1912 - protein, 285 aa, Arabidopsis thaliana
HFLQLLQISYFPENHFPKKNKTFPFVLLPPTAITAYQSELGGDSSPLRKSGRGKIEIKRIENTTNRQVTFCKRRNGLLKKAYELSVLCDAEVALIVFSSRGRLYEYSNNSVKGTIERYKKAISDNSNTGSVAEINAQYYQQESAKLRQQIISIQNSNRQLMGETIGSMSPKELRNLEGRLERSITRIRSKKNELLFSEIDYMQKREVDLHNDNQILRAKIAENERNNPSISLMPGGSNYEQLMPPPQTQSQPFDSRNYFQVAALQPNNHHYSSAGRQDQTALQLV

SEQ ID NO: 1913 - protein, 268 aa, Salmonella typhimurium
MERYENLFAQLNDRREGAFVPFVTLGDPGIEQSLKIIDTLIDAGADALELGVPFSDPLADGPTIQNANLRAFAAGVTPAQCFEMLALIREKHPTIPIGLLMYANLVFNNGIDAFYARCEQVGVDSVLVADVPVEESAPFRQAALRHNIAPIFICPPNADDDLLRQVASYGRGYTYLLSRSGVVGAENRGALPLHHLIEKLKEYHAAPALQGFGISSPEQVSAAVRAGAAGAISGSAIVKIIEKNLASPKQMLAELRSFVSAMKAASRA

SEQ ID NO: 1914 - protein, 328 aa, Triticum aestivum
FNRSLDPVLVPMLKFLQSTGAPLMLNVYPYYDYMRSNGVIPLDYALFRPLPPNKEAVDANTLLHYTNVFDAVVDAAYFAMAYLNVTNVPVMVTETGWPHKGDASAEPDANNDNADTYNSNLIRHVMNVTGTPKHPGVAVPTFIYELYDEDTRPGTASEKYWGLFDMNGIPAYALHLTGSGVLLANDTTNQTYCVAREGADEKMLQAALDWACGPGKVDCSVLAQGKPCYDPDTVEDHATYAFNAYYHGMGMGSGTCYFSGVAVITTTDPSHGSCVYGGKNGSALLNGTSLAPSSNSTADSGSRRAVGDVTSFVRIVVTALLLSVVALL

SEQ ID NO: 1915 - protein, 394 aa, Tmesipteris obliqua
PVGQATLGRIFNVLGEPVDNLGPINADKKSPIHEPAPAFTQLDTKLSIFETGIKVVDLLAPYRRGGKIGLFGGAGVGKTVLIMELINNIAKAHGGVSVFGGVGERTREGNDLYTEMKESKVINEQNISESKVALVYGQMNEPPGARMRVGLTALTIAEYFRDVNKQDVLLFIDNIFRFVQAGSEVSALLGRMPSAVGYQPTLSTEMGSLQERITSTREGSITSIQAVYVPADDLTDPAPATTFAHLDATTVLSRGLAAKGIYPAVDPLDSTSTMLQPWIVGEEHYETAQGVKKTLQRYKELQDIIAILGLDELSEEDRLTVARARKIERFLSQPFFVAEVFTGSPGKYVSLAETIKGFQMILSGELDNLPEQAFYLVGNIDEATAKAVTSQMED

SEQ ID NO: 1916 - protein, 91 aa, Saccharomyces servazzii
ISQSLSKYSNSDTIIYVGCGERGNEMAEVLMEFPELYTEISGRKEPIMKRTTLVANTSNMPVAAREASIYTGITLAEYFRDQGKNVSMIAD

SEQ ID NO: 1917 - protein, 488 aa, Muntingia calabura
  unsure (1)..(488): unsure at all Xaa locations
XGVSTLEKEIXGRISQIIGPVLDVAFTSGKMPNIYNALVVKGRDTIGQQINVTCEVQQLLGNNRVRAVAMSATDGLMRGMEVIDTGAPLSVPVGGATLGRIFNVLGEPVDNLGSVDTRTTAPIHKPAPAFIQLDTKLSIFETGIKVVDLLAPYRRGGKIGLFGGAGVGKTVLIMELINNIAKAHGGVSVFGGVGERTREGNDLYMEMKESGVINEKNLAESKVALVYGQMNEPPGARMRVGLTALTMAEYFRDVNEQDVLLFIDNIFRFVQAGSEVSALLGRMPSAVGYQPTLSTEMGTLQERITSTKKGSITSIQAVYVPADDLTDPAPATTFAHLDATTVLSRGLAAKGIYPAVDPLDSTSTMLQPRIVGEEHYETAQRVKQTLQRYKELQDIIAILGLDELSEEDRLTVARARKIERFLSQPFFVAEVFTGSPGKYVGLAETIRGFKLILSGELDSLPEQAFYLVGNIDEATAKATNLEMESNLK

SEQ ID NO: 1918 - protein, 270 aa, Mycobacterium leprae
MMVLEQSETSRLGPVFDSCRADNRAALIGYLPTGYPDVPTSVDAMIELVESGCDIIEVGVPYSDPGMDGPTIARATEVALRGGVRVRDTLAAVEAISQAGGRAVVMTYWNPVLRYGVCAFARDLESAGGHGLVTPDLIPDEARQWIAASEKHRLDRIFLVAPSSTPHRLVTTVGASRGFVYAVSVMGVTGARDAVSQVVPELVARVKAVSDIAVGVGLGVRSREQAAQIGGYADGVIVGSALVSALGDGLPRLRALAEELAAGVRQRTFM

SEQ ID NO: 1919 - protein, 440 aa, Photorhabdus luminescens
MKLSLDHIPGQMRHAINECRLIQIRGRVTQVTGTLLKAVIPGVRIGELCHLRNPDNTLSLLAEVIGFQQHQALLTPLGEMFGISSNTEVSPTGAMHQVGVGDYLLGQVLDGLGNPFAGGQLPEPQAWYPVYRDAPAPMSRKRIEHPLSLGVRAIDGLLTCGEGQRMGIFAAAGGGKSTLLSTLIRSAEVDVTVLALIGERGREVREFIESDLGEEGLKRSVLVVATSDRPAMERAKAGFVATSIAEYFRDQGKRVLLLMDSVTRFARAQREIGLAAGEPPTRRGYPPSVFAALPRLMERAGQSDKGSITALYTVLVEGDDMTEPVADETRSILDGHIILSRKLAAANHYPAIDVLRSASRVMNQIITPEHQAQAGLLRNWLAKYEEVELLLQIGEYQKGQDLVADNAIARIDAIRSWLRQGTHEPSDLPQTLALLQQITR

SEQ ID NO: 1920 - protein, 480 aa, Tiquilia plicata
  unsure (1)..(480): unsure at all Xaa locations
VXTLEXRXLGRIVQIIGPVLDVAFPPXKMPNIYNALVVKGRDTAGQPINVTCEVQQLLGNNRVRAVAMSATDGLTRGMEVIDTGAALSVPVGGATLGRIFNVLGEPVDNLGPVDTLTTSPIHRSAPAFIQLDTKLSIFETGIKVVDLLAPYRRGGKIGLFGGAGVGKTVLIMELINNIAKAHGGVSVFGGVGERTREGNDLYMEMKESGVINEENIAESKVALVYGQMNEPPGARMRVGLTALTMAEYFRDVNEQDVLLFIDNIFRFVQAGSEVSALLGRMPSAVGYQPTLSTEMGSLQERITSTKSGSITSIQAVYVPADDLTDPAPATTFAHLDATTVLSRGLAAKGIYPAVDPLDSTSTMLQPRIVGEEHYETAQRVKETLQRYKELQDIIAILGLDELSEEDRLTVARARKIERFLSQPFFVAEVFTGSPGKYVGLAETIRGFQLILSGELDGLPEQAFYLVGNIDEATAKAMNLE

SEQ ID NO: 1921 - protein, 833 aa, Streptomyces coelicolor A3(2)
MDRPNRIGDDPRTTRWGHSNAMAQGTVQVTHTGTSRWRRRTGEYASLAAALEAAADGDVLTVAPGTYRENLVVQRAVTLRGPEGAQGSVRIAPADGVPLTVRASAVIQDLHVEGQDAAAPAVLVEDGTPELLGLRVVARSASGIEVRGGARPTVRRCTVDNPAGVGIAVLDGGGGVFEECEVVAAGQAGVAVRSGAHPRLERCRVHHAAGSGLTATGEGSALEAVGCEVYEVRGSGVQVTARATAHLTDCDVHRTTGDGVTLDTDAVLTLADCRIHDIPENAVDLRSRSVLTLTRTTVRQFGRNGLSVWDPGTRVDANQCEIFDSTGDYPAVWVSDGATAVLDSCRVHDVPDALFVLDRGSRVDVVDSDLSQVRNTAVSVSDGATAQLDDCRIRDAATGAWFRDHGSGGTLNNCTLDGNRTGVIVTKGADPTIERCTVDLPSEAGVYVSAGGRGSFLNCRVTGSAGYGFHVIDGCRTTLRKCRTERCARGGYEFADGGPDTAYDSGPLVEDCTGDESTGLTAPAAPEPVVQTAAQSPGLLGSIPGQRTTEQEPLIASAAAPDPARTSKAVLGELDALVGLDSVKREVRALTDMIEVGRRRQRAGLKAASVKRHLVFTGSPGTGKTTVARLYGEILASLGVLDKGHLVEVSRVDLVGEHIGSTAIRTQEAFQRAHGGVLFIDEAYALSPEDAGRDFGKEAIDTLVKLMEDQRESVVVIVAGYTAEMERFLSVNPGVASRFSRTITFGDYGPGELLRIVEQQADEHEYRLAEGTSEALTKYFTEIPKGPAFGNGRTARQTFEAMVERHASRVAQLADPSTDDLTLLYPEDLPGLP

SEQ ID NO: 1922 - protein, 394 aa, Sphagnum palustre
PVGEATLGRIFNVLGEPVDNLGPVDAGTTFPIHRSAPAFTQLDTKLSIFETGIKVVDLLAPYRRGGKIGLFGGAGVGKTVLIMELINNIAKAHGGVSVFGGVGERTREGNDLYMEMKESKVINEQNISESKVALVYGQMNEPPGARMRVGLTALTMAEYFRDVNKQDVLLFIDNIFRFVQAGSEVSALLGRMPSAVGYQPTLSTEMGTLQERITSTKEGSITSIQAVYVPADDLTDPAPATTFAHLDATTVLSRGLAAKGIYPAVDPLDSTSTMLQPWIVGEEHYETAQGVKQTLQRYKELQDIIAILGLDELSEEDRLTVARARKIERFLSQPFFVAEVFTGSPGKYVSLIETIKGFQMILSGELDGLPEQAFYLVGNIDEATAKAATLQVES

SEQ ID NO: 1923 - protein, 456 aa, Cistus revolii
  unsure (1)..(456): unsure at all Xaa locations
IGPVLDVVFPPGKMPNIYNALVVXGQDTLGQQINVTCEVQQLLGNNRVRAVAMSATDGLMRGMSVIDTGTPLSVPVGGVTLGRIFNVLGEPVDNLGPVDTGTTAPIHNSAPAFVQLETKLSIFETGIKVVDLLAPYRRGGKIGLFGGAGVGKTVLIMELINNIAKSHGGVSVFGGVGERTREGNDLYMEMKESGVINEENLAESKVALVYGQMNEPPGARMRVGLTALTMAEYFRDVNKQDVLLFIDNIFRFVQAGSEVSALLGRMPSAVGYQPTLSTEMGTLQERITSTKKGSITSIQAVYVPADDLTDPAPATTFAHLDATTVLSRGLASKGIYPAVDPLDSTSTMLQPRIVGKEHYEIAQQVKQTLQRYKELQDIIAVLGLDELSEEDRLTVARARKMERFLSQPFFVAEVFTSSPGKYVGLAETIRGFQLILSGELDGLPEQAFYLVGNIDE

SEQ ID NO: 1924 - protein, 186 aa, Triticum aestivum
  unsure (1)..(186): unsure at all Xaa locations
VGKGRDVGLNQISMFEAKVAGGNGEQTLSRDVYRLGHGLDFFRMLSFFYTTIGFYLNTMMVVLTVYAFVWGRFYLALSGLEDYITNNTSSTDNAALWAVLNQQFFIQFGLFTALPMIIENSLEHGFLIAVWDFIVMQLQCASVFXPSHGDKTHYYGRXTLHGGAKYVRPWLLVEQRENIVAVQLTG

SEQ ID NO: 1925 - protein, 498 aa, Erithalis fruticosa
  unsure (1)..(498): unsure at all Xaa locations
XXINPTTSGSGVSTLEKKNMGRIVQIIGPVLDVAFPPGKMPNIYNALVVKGRDTVGQPINVTCEVQQLLGNNRVRAVAMSATDGLMRGMEVIDTGAPLSVPVGGATLGRIFNVLGEPIDNLGPVDTRTTSPIHRSAPAFIQLDTKLSIFETGIKVVDLLAPYRRGGKIGLFGGAGVGKTVLIMELINNIAKAHGGVSVFGGVGERTREGNDLYMEMKESGVINEENIAESKVALVYGQMNEPPGARMRVGLTALTMAEYFRDVNEQDVLLFIDNIFRFVQAGSEVSALLGRMPSAVGYQPTLSTEMGSLQERITSTKEGSITSIQAVYVPADDLTDPAPATTFAHLDATTVLSRGLAAKGIYPAVDPLDSTSTMLQPRIVGEEHYETAQRVKQTLQRYKELQDIIAILGLDELSEEDRLTVARARKIERFLSQPFFVAEVFTGSPGKYVGLTETIRGFQLILSGELDGLPEQAFYLVGNIDEATAKAMNLEMENNLKK

SEQ ID NO: 1926 - protein, 275 aa, Agrobacterium tumefaciens str. C58 (U. Washington)
MDKRFADLRAENRPALITYFMGGDPDFQTSLGIMKALPEAGADVIELGMPFSDPMADGPAIQLAGQRALKGGQTLKTTLDLAREFRKQDNATPIVMMGYYNPIYIYGVEKFLDDAIASGIDGLIVVDLPPEMDDELCIPALARGINFIRLATPTTDGKRLPAVLKNTSGFVYYVSMNGITGSALPDPSLISGAVGRIKAHTELPVCVGFGVKTADHAKAIGAVADGVVVGSAIVNQIAGSLTKDGQATADTVPAVTTLVKGLSTGVRASRLAAAE

SEQ ID NO: 1927 - protein, 584 aa, Methanothermobacter thermautotrophicus str. Delta H
MTQEGRIIKIAGPVIIAEGMRGSQMYEMVKVGEDKLIGEIIELEGDTATIQVYEETAGIKPGETVERTGGPLSVELGPGILGSIFDGIQRPLENIKALTGDYIERGVDVPSLPKDKKWTFKPTAREGQMVKGGDIIGEVEETSSITHRIMIPPNVEGKLTMIAPQGEYTVLDDIAEVETESGTEKIQMLQKWPVRKGRPYKKKLDPDVPLVTGQRAQDTFFSVAKGGTAAIPGPFGSGKTVTQQQLAKWADADIIVYVGCGERGNEMTEVLKEFPELEDPKTGNPLMDRTVLIANTSNMPVAAREACVYTGITIAEYFRDMGYDVALMADSTSRWAEAMREISGRLEEMPGEEGYPAYLASRLAQFYERAGRVTTIGSEDKIASVSVVGAVSPPGGDLSEPVTQNTLRICKVFWALDASLADKRHFPSIDWLQSYSLYIDSVQEWWASNVDPEWRKFRDEAMALLQKEAELQEIVQLVGPDALPDRERITLETTRMIREDFLQQNAYHEVDTYCSPSKQFEMLRTIIMFHRNATAALEKGAPAADIISLPVKEDIGRMKYIPEEEFPARIKEIQERIVKECSEV

SEQ ID NO: 1928 - protein, 361 aa, Arabidopsis thaliana
MQLFNSCCGKGFDGKKKEKEEPSWRVFSLKELHAATNSFNYDNKLGEGRFGSVYWGQLWDGSQIAVKRLKEWSNREEIDFAVEVEILARIRHKNLLSVRGYCAEGQERLLVYEYMQNLSLVSHLHGQHSAECLLDWTKRMKIAMSSAQAIAYLHDHATPHIVHGDVRASNVLLDSEFEARVTDFGYGKLMPDDDTGDGATKAKSNNGYISPECDASGKESETSDVYSFGILLMVLVSGKRPLERLNPTTTRCITEWVLPLVYERNFGEIVDKRLSEEHVAEKLKKVVLVGLMCAQTDPDKRPTMSEVVEMLVNESKEKISELEANPLFKNPYSSNENNREHVAEESSDVILEDKDHQQQQE

SEQ ID NO: 1929 - protein, 498 aa, Arabidopsis thaliana
MATNYNEKLLLNYVPVYVMLPLGVVNVENVFADPETLETQLKRLKEEAGVDGVMVDVWWGIIESKGPKQYDWTAYKTLFQLIARLGLKIQAIMSFHQCGGNVGDIVTIPIPQWVRDVGDNDPDIYYTNRKGTRDIEYLSIGVDNLPLFAGRTAVQLYSDYMSSFKENMADLIEAGVIVDIEVGLGPAGELRYPSYPQSQGWVFPGIGEFQCYDKYLKKDFKEAAAKAGHPEWDLPEDAGEYNDKPEETGFFKKDGTYVSEKGKFFMTWYSNKLIFHGDQILGEANKIFAGLKVNLAAKVSGIHWLYNHHSHAAELTAGYYNLFKRDGYRPIARMLSKHYGILNFTCLEMKDTDNTAEALSAPQELVQEVLSKAWKEGIEVAGENALETYGAKGYNQILLNARPNGVNPNGKPKLRMYGFTYLRLSDTVFQENNFELFKKLVRKMHADQDYCGDAAKYGHEIVPLKTSNSQLTLEDIADAAQPSGALKWDSETDLKVDG

SEQ ID NO: 1930 - protein, 483 aa, Callitriche heterophylla
EKKNLGRIVQIIGPVLDVAFPPGKMPNIYNAVIVKGRDTAGQPINVTCEVQQLLGNNRVRAVAMSATDGLTRGMEVINTGAPLSVPVGGATLGRIFNVLGEPVDNLGPVDTSTTFPIHRSAPAFIQLDTKLSIFETGIKVVDLLAPYRRGGKIGLFGGAGVGKTVLIMELINNIAKAHGGVSVFGGVGERTREGNDLYMEMKESGVINEENIAESKVALVYGQMNEPPGARMRVGLTALTMAEYFRDVNEQDVLLFIDNIFRFVQAGSEVSALLGRMPSAVGYQPTLSTEMGTLQERITSTKEGSITSIQAVYVPADDLTDPAPATTFAHLDATTVLSRGLAAKGIYPAVDPLDSTSTMLQPRIVGEEHYETAQRVKETLQRYKELQDIIAILGLDELSEEDRLTVARARKIERFLSQPFFVAEVFTGSPGKYVGLAETIRGFQLILSGELDGLPEQAFYLVGTIDEVTAKAINLEMESNLKK

SEQ ID NO: 1931 - protein, 309 aa, Rhodobacter sphaeroides
MTDAATAPTSIDLRAEYEGSGAKEVLEELDRELIGLKPVKDRIRETAALLLVERARQKLGLAHETPTLHMSFTGNPGTGKTTVALKMAGLLHRLGYVRKGHLVSVTRDDLVGQYIGHTAPKTKEVLKRAMGGVLFIDEAYYLYRPDNERDYGQEAIEILLQVMENNRDDLVVILAGYADRMENFFQSNPGFRSRIAHHIEFPDYSDEELFEIAGHMLDDQNYQMTPEAETALRAYIGLRRNQPHFANARSIRNALDRARLRQANRLFTASSGPLDARALSTMAEEDIRASRVFKGGLDSERRAAEALAR

SEQ ID NO: 1932 - protein, 253 aa, Glycine max
MKPVFCGNLDFDARQSDVERLFRRYGKVDRVDMKSGFAFVYMEDERDAEYAIRRLDRTEFGRKGRRIRVEWTKQERDSRRSGGDSRKSSSNSRPSKTLFVINFDPVHARTRDLERHFDSYGKILNIRIRRNFAFIQFESQEDATRALEATNLSKFMDRVITVEYAIRDDDDRDRRNGYSPDRRGHDSPDGRYGRGRSPSPYRRGRGSPDYGHGSNPSSRPDPRGSPKYERAESPINNGRYDSRSPPPRERSRS

SEQ ID NO: 1933 - protein, 250 aa, Arabidopsis thaliana
MEGGAALYNPRTVEEVFKDFKGRRTAIVKALTTDVQEFYQQCDPEKENLCLYGLPNEEWEVNLPAEEVPPELPEPALGINFARDGLSEKEWLSLVAIHSDAWLLSVSFYFGSRFSFHKEERKRLFNMINDVPTIFEVVTGMAKAKDKSSAANQNGNKSKSNSKVRTSEGKSSKTKQPKEEDEEIDEDDEDDHGETLCGACGDSDGADEFWICCDLCEKWFHGKCVKITPARAEHIKQYKCPSCSNKRARA

SEQ ID NO: 1934 - protein, 111 aa, Beta vulgaris
YKAVNRESYEIVAVKKMKRKFYFWEECVNLREVKSLPSIESSNIIKLKEVVRENNDLFFIFEYMQYNLYQIMKDRHRPFTEEEIRNFLTQVLQGLAHMHRNGYFHRDLKPQ

SEQ ID NO: 1935 - protein, 403 aa, Arabidopsis thaliana
MSDLSPERFKLAVTSPSSIPESSSALQLHHSYSRKQKSLGLLCTNFLALYNREGIEMVGLDDAASKLGVERRRIYDIVNVLESVGVLTRRAKNQYTWKGFSAIPGALKELQEEGVKDTFHRFYVNENVKGSDDEDDDEESSQPHSSSQTDSSKPGSLPQSSDPSKIDNRREKSLGLLTQNFIKLFICSEAIRIISLDDAAKLLLGDAHNTSIMRTKVRRLYDIANVLSSMNLIEKTHTLDSRKPAFKWLGYNGEPTFTLSSDLLQLESRKRAFGTDITNVNVKRSKSSSSSQENATERRLKMKKHSTPESSYNKSFDVHESRHGSRGGYHFGPFAPGTGTYPTAGLEDNSRRAFDVENLDSDYRPSYQNQVLKDLFSHYMDAWKTWFSEVTQENPLPNTSQHR

SEQ ID NO: 1936 - protein, 566 aa, Rhodopseudomonas palustris
MAAAAALAMDGTADRRGADRGRLGADREFELHHRTLPRRNDLARLLRRQHRQFGRRYARDDLWFPARTLAAGHRNRCDRGAVRSAGRFAHPRQSDPQRDHADSSVRRHPTMAGRTSDHLTPLVPSFDRPYVGPMTDFSPREIVSELDRFIVGQADAKRAVAIALRNRWRRLQLEGSLREEVLPKNILMIGPTGVGKTEIARRLAKLAGAPFLKVEATKFTEVGYVGRDVEQIIRDLVEVAIAQVREKKRKDVQARAQVAAEERVLDALVGPGSGPATRDSFRKKLRAGELNDKEIEIETQAGSGSPMFEIPGMPGAQIGAVSLGDIFGKMGGRTKKRRLTVADSHEILVNEEADKLLDTDQLVQEAIAAVENNGIVFLDEIDKICVRDGRSGGEVSREGVQRDLLPLIEGTTVSTKHGAVKTEHILFIASGAFHIAKPSDLLPELQGRLPIRVELNALSRDDMRRILTEPEASLIKQYVALMKTEGVTLDFSDDAIDALADVAVAVNSTVENIGARRLQTVMERVLDEISFVAPDRHGETFRVDADYVKTNVGDLAKNTDLSRFIL

SEQ ID NO: 1937 - protein, 202 aa, Triticum aestivum
MAFALKASASPALAASSAAAASSPSFSAASAVPRGRAAAARRVALRGAARPVAAIRASASAAAPAAPAVAGDKRTISGTFTNLKAQGKIAFIPFIVAGDPDLATTAKALKVLDACGSDVIELGVPYSDPLADGPVIQASATRALTKGTTFEDVISMVKDVVPELSCPLALFTYYNPILKRGVANFMSVVKETGVHGLVVPDV

SEQ ID NO: 1938 - protein, 849 aa, Cryptococcus neoformans var. grubii
MATNYPSLFRSEEMSLVQLYIPSEVAHDTISELAEMSNFQFKDLNPSLTSFQRPFTPRLRRLAEMARRLRFFRSQITSLSPPLGVPPLAAVPPFTTVGPRAQNAYDELEEKLKEHERRLNEMNKSWEELGRRKSELEENKCVLKETAGFFDEAGHRHTEIRTSMEDSSDAAPLLEHAAEYGTLPGESGLSGFDLEFVAGTIDRARMPTFERILWRVLRGNLYMNYSEIEEPFVDTVSGKETFKDVFIIIAHGQELLAKIRKVAESMGGTLYNIDSATDKRSDALRQVSARLEDVDNVLYNMGQTRRVELSKIAESLEAWTDAVMREEEIYKTLNLLSYDQGRKTLVAEGWCPSRDITAIQLGLRRAMDTAGTSVPAILSELRTHQTPPTFHRTNKFTEGFQTLIDSYGIATYQEVNPGLYAVITFPFLFAVMFGDIGHGILMFLTAAAMIFWERQIAKNGVNENVETFFFGRYLIVLMGIFSVFTGFMYNDIFSKTLHLWQSGWEWPSNSTGLIEAEPTGNIYPFGMDPMWHGSDNALIFNNSYKMKMSIILGVIHMTFAICLQVPNHIHFKKPLNIYAEFIPQMLFFHSIFGYLVVCIIYKWSVDWSQSVTSPPGLLNMLIYMFLSPGTIEPGTQLYAGQGFIQVVLLLIALVCVPWMLALKPYMLWKEHQRIVAQGYQGLQGQDNGGMHGRDSIGAESRAEEEEEVGMAVAESSDEEHPFEMGDIIVHQVIHTIEFCLGCISNTASYLRLWALSLAHAQLSEVLWSMTLQLAFDFNGGLISRAVFLFVMFAVWFGGTVGILCVMEGLSAFLHALRLHWVEANGKHYMAGGYPFTPLSFATIGQEEDI

SEQ ID NO: 1939 - protein, 496 aa, Hemerocallis lilioasphodelus
MRTNPTTSGPAVSTLEEKNLGRIAQIIGPVLDVVFPPGKMPNIYNALVVKSRDTAGQQINVTCEVQQLLGNNRVRAVAMSATDGLTRRMEVIDTGAPLSVPVGGATLGRIFNVLGEPVDNLGPVDSRTTSPIHRSAPAFIQLDTKLSIFETGIKVVDLLAPYRRGGKIGLFGGAGVGKTVLIMELINNIAKAHGGVSVFGGVGERTREGNDLYMEMKESGVINEKNIAESKVALVYGQMNEPPGARMRVGLTALTMAEYFRDVNEQDVLLFIDNIFRFVQAGSEVSALLGRMPSAVGYQPTLSTEMGSLQERITSTKEGSITSIQAVYVPADDLTDPAPATTFAHLDATTVLSRGLAAKGIYPAVDPLDSTSTMLQPRIVGEEHYETAQKVKQTLQRYKELQDIIAILGLDELSEEDRLTVARARKIERFLSQPFFVAEVFTGSPGKYVGLAETIKGFQLILSGELDGLPEQAFYLVGNIDEATAKAINLEEENKL

SEQ ID NO: 1940 - protein, 480 aa, Buchnera aphidicola str. APS (Acyrthosiphon pisum)
MLNRLRRTKIVATLGPSTDINNNLEKIIRSGVNVLRFNFSHGSKDEHKSRANQAREIMTRLNFHIALLGDLQGPKIRISKFIKNNIFLNVGDFFILDANLDQNNGNQERVGIDYKQLPYDLKVGDVLLLDDGRIQLKVIKSTGHEILTKVVIGGILSNNKGINKLGGGLSADALTEKDKKDIILATEINVDYLAISFPRCSNDLKQARKLAKEFGSNAKIIAKIERAEAVLNQNTIEDIILASDAIMIARGDLGVEIGDSELAGIQKKLIRTARQLNRIVITATQMMESMITNPLPTRAEVMDVANAVLDGSDAVMLSAETASGEYPAETVIKMAKICKGAEKVPSINVSRHRIHAKFDDIEEAIAMSAMYVANHLKGITAIITMTESGKTALMTSRITSGLPIFALSKNKETLNLASLYRGVTPIYFNSKNNNFKAANEAIVLLRKRGFLCRGELVIITQGDIMGKIGKTNTSRILKVV

SEQ ID NO: 1941 - protein, 404 aa, Dodecatheon meadia
GLPKEMKVIDTGAALSVPVGGATLGRIFNVLGDPVDNLGPVDTSTTSPIHRSAPAFIQLDTKLSIFETGIKVVDLLAPYRRGGKIGLFGGAGVGKTVLIMELINNIAKAHGGVSVFGGVGERTREGNDLYMEMKESGVINEENIAESKVALVYGQMNEPPGARMRVGLTALTMAEYFRDVNEQDVLLFIDNIFRFVQAGSEVSALLGRMPSAVGYQPTLSTEMGSLQERITSTKEGSITSIQAVYVPADDLTDPAPATTFAHLDATTVLSRGLASKGIYPAVDPLDSTSTMLQPRIGGEEHYETAQRVKETLQRYKELQDIIAILGLDELSEEDRLTVARARKIERFLSQPFFVAEVFTGSPGKYVGLAETIRGFQLILSGELDGLPEQAFYLVGNIDEATAKA

SEQ ID NO: 1942 - protein, 253 aa, Chlamydia trachomatis
MSKLTQVFKQTKLCIGYLTAGDGGTSYTIEAAKALIQGGVDILELGFPFSDPVADNPEIQVSHDRALAENLTSETLLEIVEGIRAFNQEVPLILYSYYNPLLQRDLDYLRRLKDAGINGVCVIDLPAPLSHGEKSPFFEDLLAVGLDPILLISAGTTPERMSLIQEYARGFLYYIPCQATRDSEVGIKEEFRKVREHFDLPIVDRRDICDKKEAAHVLNYSDGFIVKTAFVHQTTMDSSVETLTALAQTVIPG

SEQ ID NO: 1943 - protein, 222 aa, Pinus radiata
MGRGKIEIKRIENTTNRQVTFCKRRNGLLKKAYELSVLCDAEVALIVFSSRGRLYEFANHSVKRTIERYKKTCVDNNHGGAISESNSQYWQQEAGKLRQQIDILQNANRHLMGDGLTALNIKELKQLEVRLEKGISRVRSKKNEMLLEEIDIMQRREHILIQENEILRSKIAECQNSHNTNMLSAPEYDALPAFDSRNFLHANLIDAAHHYAHQEQTTLQLG

SEQ ID NO: 1944 - protein, 160 aa, Trametes versicolor
LEECLKIRNVLAEFEEYNVSSQSPYAQWGHKDFKKSPIAIVGAREYIFSENIGILGDLAAGKEQTFGTLTARSLAWIGGKLHYGHPDFLNALYMTTRGGVSKAQKGLHLNEDIYAGMNAFGRGGRIKHTEYYQCGKGRDLGFGTILNFRPRSELVWANIW

SEQ ID NO: 1945 - protein, 242 aa, Cyanidium caldarium
MFIAYLTAGAPDLNTTKQALLNLANDGADVIEIGVPYSDPLADGMILQKASQQALKNGFRLEQLWHLLAEIELPVPVVILAYYNQIFHYGVEKWVTTLVNLKVKALIVPDLPYEEAAILRAACARHHLHMIWLISPTTPKVRAKQLALACDDWIYLVSRTGVTGVDAHFDNQIPNMIAELKQVTTTPIALGFGIHQKQQLQLVKSWGADGVIIGTACMQILLEKGVDQLTEWISAMKKSSYP

SEQ ID NO: 1946 - protein, 186 aa, Azospirillum brasilense
VDTSNILFICGGAFAGLDKIIAQRGKGTSIGFGADVRGPDERSTGDILREVEPEDLLKFGLIPEFIGRLPVVATLSDLDETALVEILTKPKNALVKQYQRLFEMEDVRLEFSDDALRTISHKAIQRKTGARGLRSIMESILLDPMFDLPGLSGVESILVNKEVVEGRAKPLYVHAERRGEQQAPGA

SEQ ID NO: 1947 - protein, 409 aa, Thermobifida fusca
MWSTATGSPRAGIPVRWGCSPPTAGCWPWRRTGRAAASPWWSSREAEAGGLRGVLQRAADRPSRKRNRGEYHDAGRPLGCRPVLVSMADGRTVSVRLWRGLGEVPADCKRSAVIVGTFDGVHRGHQRLLHQAREHADRLGLPLVAVTFDPPLGLVAGTLDPPVVLTGAEYRAGLLAQHGVDAVCVLEATPDLAALPSRDLAHRILVDGVPAAVALLAEEDDDGVVFDLAAVHALGKEHDFSVVGLAAGSGPEAVTAAQVRSLVLAGDVAGAHTALGRPHRVEGVVVHGAARGRELLGFPTANLDCPPRSAVPADGVYAGWLLRLDTPPEGTEARWPAAVSVGTNPTFDGQVRTVEAYALDRDDLELYGLPMAVEFTHHIRPMLRFDSIDELIEAMQRDVDRCRELLAGR

SEQ ID NO: 1948 - protein, 473 aa, Arabidopsis thaliana
MTNQQEQHIAIFTTASIPWLTGTAVNPLFRAAYLANDGERRVTLVIPWLTLKHQKLVYPNSITFSSPSEQEAYVRQWLEERVSFRLAFEIRFYPGKFAIDKRSILPVGDISDAIPDEEADIAVLEEPEHLTWFHHGQKWKTKFNYVIGIVHTNYLEYVKREKQGRVKAFFLKYLNSWVVGIYCHKVIRLSAATQEYPKSIVCNVHGVNPKFLEIGLRKLEQQKLQEQPFTKGAYYIGKMVWSKGYKELLKLLEKHQKELAELEVDLYGDGEDSEEIKEAARKLDLTVNVYPGRDHADSLFHNYKVFLNPSTTDVVCTTTAEALAMGKIVVCANHISNKFFKQFPNCRTYDDGQGFVRATLKALGEQPSQLTEQQRHELSWEAATQRFIKVSDLNRLSRADSNLSKRSVFASSSISVGKNLEDMSAYIHFLASGFEASRTAFGAIPGSLQPDEELCRDLGLSLNTPSPNTRKQD

SEQ ID NO: 1949 - protein, 484 aa, Gnetum gnemon
MKKKNTFLVSVSTKSETSIGQITQIIGPVLDVSFPPGNLPNIYNSLIVKGQKDDRAFSVTCEVQQLLGNNTVRAVAMSATDGLTRGMKVINTGASLSVPVGKATLGRIFNVLGEPVDNLGPVDTDTTFPIHRPAPAFTQLDTNLSIFETGIKVVDLLAPYRRGGKIGLFGGAGVGKTVLIMELINNIAKAHGGVSVFGGVGERTREGNDLYMEMKESGVINERNIAESKVALVYGQMNEPPGARMRVGLTALAMAEYFRDVNEQDVLLFIDNIFRFVQAGSEVSALLGRMPSAVGYQPTLSTEMGSLQERITSTKKGSITSIQAVYVPADDLTDPAPATTFAHLDATTVLSRGLAAKGIYPAVDPLDSTSTMLQPEIVGEQHYEIAQGVKQTLQRYKELQDIIAILGLDELSEEDRLTVARARKIERFLSQPFFVAEVFTGSPGKYVSLIETIRGFQMILSGDLDGLPEQSFYLVGNIDEVISS

SEQ ID NO: 1950 - protein, 267 aa, Chlorobium tepidum TLS
MKENRITRLVKQDKKLLIAYYMPEFPVPGATLPVLEALQESGVDLIELGMPYSDPIGDGSVIQDAAHKAISHGVHVGSIFELVRRARNGEGCKKITTPILLMGYCNPLIAYGGDCFMADAVKAGVDGLLIPDLPPEESEDFLERAKHFGLSVIYLISPVTPPDRIELIDSMSTDFSYCLAVNATTGTGKLDVAGMDEKIAEYLKRVRQHTKKKFVVGFGIKDRERVRKMWELADGAVVGSALLQHVATAKTPEETAELAAGFWKSLR

SEQ ID NO: 1951 - protein, 314 aa, Desulfovibrio desulfuricans G20
MQIARQLQEITLDLSGGSCVTIGNFDGVHNGHRKLIGRMMAKAAKASLPGVVVTFCPHPLRVLVGPHTPPFITDYEKKLDLLEALGVDLTLMLQFTRELAALEPEEFVRSILVDGLNVKELVVGYDYSFGKGRKGHFELLVELGEKYGFSCERLDPVIIDGAVVSSTRIRDMIKAGDVWGVRPLMDRFYVVRGTVVHGKKRGGRLLGFPTANLEVRDELVPGPGVYAVWVEVDGNLYKGVTNIGYNPTFGNETLSVETYIMDFDRDIYGWELRLNFVHRLRDERKFSGLDDLMTQIRSDVELGRQILDSQEAGL

SEQ ID NO: 1952 - protein, 269 aa, Buchnera aphidicola str. Bp (Baizongia pistaciae)
MNNRYYQLNKNLIPYKLGCYIPFVVLGDPSIEISLEIIYSLIKNGADGLELGIPFSDPLADGPIIQQANLRAFSANITLTKCFEMLFKIRTHNPKIPIGILIYANLIFKLGIQKFYSICSKIDIDSVLIADVPIEESFEFEQHSIKNNIDSIFVCPPDASKNFLKKLSKHSTGYIYLLSRSGVTGIDMKITPPLKNFVKELKKLTSIPIIQGFGISNENQIKNIILSGVSGVICGSVIIQIIANNLNNKKIMLKKIKKLSNRFKKATII

SEQ ID NO: 1953 - protein, 494 aa, Echinops bannaticus
PTTSGSGIATLDKKNLGRIAQIIGPVLDVAFPPGKMPNIYNALVVKGRDTAGQPINVTCEVQQLLGNNRVRAVAMSATDGLTRGMDVMNTGAPLSVPVGGATLGRIFNVLGEPIDNLGPVDASTTFPIHRSAPAFIQLDTKLSIFETGIKVVDLLAPYRRGGKIGLFGGAGVGKTVLIMELINNIAKAHGGVSVFGGVGERTREGNDLYMEMKESGVINEQNIAESKVALVYGQMNEPPGARMRVGLTALTMAEYFRDVNEQDVLLFIDNIFRFVQAGSEVSALLGRMPSAVGYQPTLSTEMGSLQERITSTKEGSITSIQAVYVPADDLTDPAPATTFAHLDATTVLSRGLAAKGIYPAVDPLDSTSTMLQPRIVGEEHYDIAQEVKQTLQRYKELQDIIAILGLDELSEEDRLTVARARKIERFLSQPFFVAEVFTGSPGKYVGLAETIRGFQLILSGELDGLPEQAFYLVGNIDEATAKAMNLEMESNSKK

SEQ ID NO: 1954 - protein, 610 aa, Mycobacterium leprae
MTRPQSTAEDARNAMVAGLLASGISVNGLQPSHNPQVASQMFRTATTLDPGMCDAWQARILAGDQSIEVLAGAWSSIRTFGWETRRLGVTDLQFRPEVSDGLFLRLAVTSVESLACAYAAVLVKAKRYAEAAKLLESVEPRHPFDTELVNYVRGMLYFRTKRWPDVLTQFPEGKQWRHPDLKAAGAAMATSALASLGVFEEAFRRGKEAIEGDRVPRAANIALYTQGMCLRHVGREDEAVELLRRVYSRDAKFTPAREALDNNNFRLTLTDPETIEARTDPWDPDSAPTRAQTEAARYARIAAKYLAEGDAELNAMLGMEQAKREIKLIKSTTRVNLARAKMGLPVPVTSRHTLLLGPPGTGKTSVARAFTKQLCGLTVLRKPLVVETSRTKLLGRHMADAEKNTEEMLEGALGGAVFFDEMHTLHEKGYTRGDPYGNAIINTLLLYMENHRDELVVFGAGYAKAMDKMLEVNQGLRRRFSTVIEFFSYTPEELIALTQLMGQENEDVITEQEAQVLLPSYTKFYLDETYSEDGDLIRGIDMLGNAGFVRNVVEKARDHRSFRLDDEDLDAVLASDLTQFSAEQLLRFKELTSADLTEGLSAAVAERKSS

SEQ ID NO: 1955 - protein, 492 aa, Prostanthera ovalifolia
  unsure (1)..(492): unsure at all Xaa locations
RINPXXSGSGVSTLEKKNPGRIIQIIGPVLDVAFPPGKMPNIYNALVVXXRDTVGQPINVTCEVQQLLGNNRVRAVAMSATDGLTRGMEVIDTGAPLSVPVGGSTLGRIFNVLGEPVDNLVPVDARTTFPIHRSAPAFIQLDTKLSIFETGIKVVDLLAPYRRGGKIGLFGGAGVGKTVLIMELINNIAKAHGGVSVFGGVGERTREGNDLYMEMKESGVINEGNIAESKVALVYGQMNEPPGARMRVGLTALTMAEYFRDVNEQDVLLFIDNIFRFVQAGSEVSALLGRMPSAVGYQPTLSTEMGSLQERITSTKEGSITSIQAVYVPADDLTDPAPATTFAHLDATTVLSRGLAAKGIYPAVDPLDSTSTMLQPRIVGEEHYEIAQRVKQTLQRYKELQDIIAILGLDELSEEDRLTVARARKIERFLSQPFFVAEVFTGSPGKYVGLAETIRGFQLILSGELDGLPEQAFYLVGNIDEATAKAMNLEME

SEQ ID NO: 1956 - protein, 139 aa, Triticum aestivum
  unsure (1)..(139): unsure at all Xaa locations
MLKGVTPELSCPIVLFTYYNPILKRGVGNFMSTIKQAGIHGLVVPDLPLEETALLRSEAIXMHNIELXVLLTTPTRPTVRMKGNCTXFRXFLLPCDAVRVTGARSKCNLRXVKHLPXGDXKKXTNKPVLXVPVLPTPNI

SEQ ID NO: 1957 - protein, 251 aa, Arabidopsis thaliana
MEAGGAYNPRTVEEVFRDFKGRRAGMIKALTTEKENLCLYGHPNEHWEVNLPAEEVPPELPEPVLGINFARDGMAEKDWLSLVAVHSDAWLLAVAFFFGARFGFDKADRKRLFNMVNDLPTIFEVVAGTAKKQGKDKSSVSNNSSNRSKSSSKVETLFSTRGSESRAKFSKPEPKDDEEEEEEGVEEEDEDEQGETQCGACGESYAADEFWICCDLCEMWFHGKCVKITPARAEHIKQYKCPSCSNKRARS

SEQ ID NO: 1958 - protein, 427 aa, Pseudomonas syringae pv. syringae B728a
MTDTRNGEDNGKLLYCSFCGKSQHEVRKLIAGPSVFICDECVDLCNDIIREEVQEAQAESSAHKLPSPKEISGILDQYVIGQERAKKVLAVAVYNHYKRLNQRDKKNDDVELGKSNILLIGPTGSGKTLLAETLARLLNVPFTIADATTLTEAGYVGEDVENIIQKLLQKCDYDVEKAQMGIVYIDEIDKISRKSDNPSITRDVSGEGVQQALLKLIEGTVASVPPQGGRKHPQQEFLQVDTRNILFICGGAFSGLEKVIQNRSTRGGIGFNAEVRSKEEGKKVGESLREVEPDDLVKFGLIPEFVGRLPVLATLDELDEAALIQILTEPKNALTKQYAKLFEMEGVDLEFRTDALKSVARRALERKTGARGLRSILEGVLLDTMYEIPSQSDVSKVVIDESVIDGTSKPLLIYENSEPPAKVAPDA

SEQ ID NO: 1959 - protein, 257 aa, Listeria innocua
MTKTLTKKLANKDHASVVTYIMGGDGGLDNLEEQLLFLEKSGVSAIEIGIPFSDPVADGPVIQLAGLRALKERVSLEAILTKLATSKVQIPLIIMSYINPIFHLGIPKFIEMVQKTPVKGLIIPDLPYEHRTLITPELKGTDIALIPLVSLTSPKERLEEIANQAEGFIYAVTVNGTTGVRNEFNTHIDTHLAYLKSISPVPVLAGFGVSSIEHVEKFARVCDGVIIGSKVVQMLHDGETRELGTFLQNAAEVQIEN

SEQ ID NO: 1960 - protein, 275 aa, Nostoc punctiforme
MTSISNSFQTLRDRQQCALIPFITAGDPNLETTAQALRILDRNGADFIELGIPYSDPLADGPVIQAAATRALQKGTKLEQVLEMLQAVTPTLKAPIILFTYYNPILHRGIKTFLAQIAAVGVQGLVVPDLPLEEAEELIQTAASFGIEVILLVAPTSSKDRILAIARQSQGFIYLVSVTGVTGIRAQIQDRVKDLITDLRSVTDKPIGVGFGISGPEQAHQVREWGADAVIVGSAFVKRLAEGSPTERLQAVEKLCQELKAAITPVSLQQVVSAK

SEQ ID NO: 1961 - protein, 490 aa, Quintinia verdonii
GSGVSTLEKKNLGRIAQIIGPVLDVAFPPGKMPNIYNALVVKGRDTVGQPINVTCEVQQLLGNNRVRAVAMSATDGLKRGMEVIDTGAPLSVPVGGATLGRIFNVLGEPVDNLGPVDTRTTSPIHRSAPAFIQLDTKLSIFETGIKVVDLLAPYRRGGKIGLFGGAGVGKTVLIMELINNIAKAHGGVSVFGGVGERTREGNDLYMEMKESGVINEQNIAESKVALVYGQMNEPPGARMRVGLTALTMAEYFRDVNEQDVLLFIDNIFRFVQAGSEVSALLGRMPSAVGYQPTLSTEMGSLQERITSTKEGSITSIQAVYVPADDLTDPAPATTFAHLDATTVLSRGLAAKGIYPAVDPLDSTSTMLQPRIVGEEHYETAQRVKQTLQRYKELQDIIAILGLDELSEEDRLTVARARKIERFLSQPFFVAEVFTGSPGKYVGLAETIRGFQLILSGELDGLPEQAFYLVGNIDEATAKAMNLEMESNLKK

SEQ ID NO: 1962 - protein, 480 aa, Escherichia coli K12
MSRRLRRTKIVTTLGPATDRDNNLEKVIAAGANVVRMNFSHGSPEDHKMRADKVREIAAKLGRHVAILGDLQGPKIRVSTFKEGKVFLNIGDKFLLDANLGKGEGDKEKVGIDYKGLPADVVPGDILLLDDGRVQLKVLEVQGMKVFTEVTVGGPLSNNKGINKLGGGLSAEALTEKDKADIKTAALIGVDYLAVSFPRCGEDLNYARRLARDAGCDAKIVAKVERAEAVCSQDAMDDIILASDVVMVARGDLGVEIGDPELVGIQKALIRRARQLNRAVITATQMMESMITNPMPTRAEVMDVANAVLDGTDAVMLSAETAAGQYPSETVAAMARVCLGAEKIPSINVSKHRLDVQFDNVEEAIAMSAMYAANHLKGVTAIITMTESGRTALMTSRISSGLPIFAMSRHERTLNLTALYRGVTPVHFDSANDGVAAASEAVNLLRDKGYLMSGDLVIVTQGDVMSTVGSTNTTRILTVE

SEQ ID NO: 1963 - protein, 233 aa, Streptomyces coelicolor A3(2)
MTSTVPALGTRTAEGSALQAVLLDMDGTLVDTEGFWWDVELEVFASLGHTLDDSWRHVVVGGPMTRSAGFLIEATGADITLAELSVLLNDGFEQRIGRDLPLMPGAARLLAELSAHEIPTALVSASHRRIIDRVLTSLGPRHFALTVAGDEVPRTKPHPDPYLAAAAGLGVDPARCAVVEDTATGVAAAEAAGCHVVAVPSVAPITPAARRTVVASLEEVDLTFLRGLMTQMR

SEQ ID NO: 1964 - protein, 245 aa, Malus x domestica
MAYESKSLSLDSPQRKLGRGKIEIKRIENTTNRQVTFCKRRNGLLKKAYELSVLCDAEVALIVFSNRGRLYEYANNSVKGTIERYKKASADSSNTGSVSEASTQYYQQEAAKLRARIVKLQNDNRNMMGDALNSMSVKDLKSLENKLEKAISRIRSKKNELLFAEIEYMQKRELDLHNNNQLLRAKIAENERASRTLNVMAGGGTSSYDILQSQPYDSRNYFQVNALQPNHQYNPRHDQISLQLV

SEQ ID NO: 1965 - protein, 535 aa, Hordeum vulgare subsp. vulgare
MEVNVKGNYVQVYVMLPLDAVSVNNRFEKGDELRAQLRKLVEAGVDGVMVDVWWGLVEGKGPKAYDWSAYKQLFELVQKAGLKLQAIMSFHQCGGNVGDAVNIPIPQWVRDVGTRDPDIFYTDGHGTRNIEYLTLGVDNQPLFHGRSAVQMYADYMTSFRENMKDFLDAGVIVDIEVGLGPAGEMRYPSYPQSHGWSFPGIGEFICYDKYLQADFKAAAAAVGHPEWEFPNDAGQYNDTPERTQFFRDNGTYLSEKGRFFLAWYSNNLIKHGDRILDEANKVFLGYKVQLAIKISGIHWWYKVPSHAAELTAGYYNLHDRDGYRTIARMLKRHRASINFTCAEMRDSEQSSQAMSAPEELVQQVLSAGWREGLNVACENALPRYDPTAYNTILRNARPHGINQSGPPEHKLFGFTYLRLSNQLVEGQNYVNFKTFVDRMHANLPRDPYVDPMAPLPRSGPEISIEMILQAAQPKLQPFPFQEHTDLPVGPTGGMGGQAEGPTCGMGGQVKGPTGGMGGQAEDPTSGMGGELPATM

SEQ ID NO: 1966 - protein, 476 aa, Saccharomyces castellii
  unsure (1)..(476): unsure at all Xaa locations
MLQSRLARLTHLRTEPSANDIRKTSIIGTIGPQSNNVPTIVALRKAGLNIIRMNFSHGSHEFHQSVIDNARESESQYHGRPLGIALDTKGPEIRTGSFVRDNGVPVKTGHEMIFSTDPQYKECGDDQIMYVDYANITKVMEVGKFIYVDDGAISFEVLQVKDAETLKVRALNDGTLNSHKGVNLPGTDVDLPALSEKDKQDLQFGVKNNIHMIFASFIRTPDDIRTIRQFLGEDGKQIKIIAKIENEQGVNNFDQILQLADGVMIARGDLGIEIPAPEVLAVQKKLIAKCNLAGKPVICATQMLESMTYNPRPTRAEVSDVGNAILDGADCVMLSGETAKGAYPIDAVNMMADTALIAEEATAYLPNYDDIRNCTPKPTPTTETVAASAVAAVFEQDAKAIIVLSTSGDTARLCSKYRPNCPIILITRNDNTARFSHLYRAVFPFVYNKPALDDWVXDVQNRIDFGIEMAKQMGIL

SEQ ID NO: 1967 - protein, 487 aa, Frankenia pulverulenta
  unsure (1)..(487): unsure at all Xaa locations
GXSTLEKKNLGRIAQIIGPVLDVAFPPGKMPNIYNALVVKGRDTAGQPINVTCEVQQLLGNNRVRAVAMSATEGLTRGMEVIDTGAPLSVPVGGATLGRIFNVLGEPVDNLGPVDTRTTSPIHRSAPAFIQLDTKLSIFETGIKVVDLLAPYRRGGKIGLFGGAGVGKTVLIMELINNIAKAHGGVSVFGGVGERTREGNDLYMEMKESGVINEQNIAESKVALVYGQMNEPPGARMRVGLTALTMAEYFRDVNEQDVLLFIDNIFRFVQAGSEVSALLGRMPSAVGYQPTLSTEMGTLQERITSTKEGSITSIQAVYVPADDLTDPAPATTFAHLDATTVLSRGLAAKGIYPAVDPLDSTSTMLQPRIVGEEHYETAQRVKETLQRYKELQDIIAILGLDELSEEDRLTVARARKIERFLSQPFFVAEVFTGSPGKYVGLAETIRGFQLILSGELDGLPEQAFYLVGNIDEATAKAMNLEMESKLK

SEQ ID NO: 1968 - protein, 226 aa, Oryza sativa (japonica cultivar-group)
MEPTAVATTVVTATKHVAEWQRDSTAAAAVDREASGLRNNYNKCSAITIECSDLDLSMLDRELLCEVSAFPCKYLGLPLSLGKLTKADLQPMVEKIAGCLLSWTAGQLTTIGSTLVESILTSILVHLLIAINPTKWVLKGTDKVRCGFLWQGVAEAKGGHCRLAWTKVCAPKQLGGLGIHNLDLLGVALSTKWLWSLRTAPDKPWQGLPMLVLQREKDLLLASTRW

SEQ ID NO: 1969 - protein, 73 aa, Brassica oleracea
LEGRLDRSINRIRSKKNELLFAEIDYMQKREVDLHSDNQLLRAKIAENERNNPSMNLMPGGSNYEQIIPPPQT

SEQ ID NO: 1970 - protein, 221 aa, Enterococcus faecium
MLESMQENPRPTRAEASDVANAVFDGTDATMLSGESANGDYPVEAVSTMARIDQEAENALSELGTFQLNEFDKTDVTETIGLSVARAAKNLGVKTIVAATESGYTAKMISKYRPDADILAVTFDERTKRGLMLNWGVYPTVAEKPSTTDEMFELAAKKAVELGFASEGDLILITAGVPVGERGTTNVMKIQMIGSKLLEAQALDKNLSLQMQLLLHLLKKL

SEQ ID NO: 1971 - protein, 481 aa, Arabidopsis thaliana
MNRQNGGGQRLRSARPTTIHDCALSGDLIALQRLLRDNPSLLNERNPVMYHTPLHVSAGNGNVDIVKYLLAWTGSDKVELEAMNTYGETPLHMAAKNGCNEAAKLLLESGAFIEAKASNGMTPLHLAVWYSITAKEISTVKTLLDHNADCSAKDNEGMTPLDHLPQGQGSEKLRELLRWFLQEQRKRSALEQCGKTKAKMELLEDELSNIVGLSELKTQLRKWAKGMLLDERRRALGLNIGTRRPPHMAFLGNPGTGKTMVARVLGKLLNTVGILPTDKVTEVQRTDLVGEFVGHTGPKTRRKIQEAEGGILFVDEAYRLIPMQKADDKDYGLEALEEIMSVIDTGKIVVIFAGYSEPMKRVIASNEGFCRRVTKFFNFSDFSAKELAQILHIKMNNQGEDTLFYGFRLHESCTLQEIASLIEAETTEKQRKEMNGGLVDTLLVNARENLDLRLSFECVDTEEICTIKLEDLEAGLRVFSQ

SEQ ID NO: 1972 - protein, 435 aa, Clostridium perfringens str. 13
MGKFEDKKQLRCSFCGKNQEQVKRLIAGPGVYICDECIELCSEIIEDEFEGNTESSPLEASNLPKPQEIKDYLDQYVVGQDRAKKSLAVAVYNHYKRINANKAEDDVELQKSNILLLGPTGSGKTLLAQTLAKMLNVPFAIADATTLTEAGYVGEDVENILLKLIQNADYDVERAEKGIIYIDEIDKIARKSENPSITRDVSGEGVQQALLKILEGTTASVPPQGGRKHPHQEFIQINTSNILFICGGAFDGIDKIIEKRGTKSSIGFGAEVKGKSEKNVGELLKDIMPGDLLKFGLIPEFVGRLPVLVTLEALDNEALVSILTKPKNALVKQYKKLFELDNVKLDFTEEALKAIADEAINRKTGARGLRAIVEETMMDIMFDIPSEENIVKATITEETIKDRKDPELEKLPEGEVRPTLKTEKKNKARKDIETA

SEQ ID NO: 1973 - protein, 311 aa, Sinorhizobium meliloti
MLMPDAPSNTESLPTSVDLAGEYQASGVAEILDELDRELVGLKPVKQRIRETAALLLVERARRAMGLSHEPPSLHMSFTGNPGTGKTTVALRMANLLHRLGYIRKGHLVSVTRDDLVGQYIGHTAPKTKEILKKAMGGVLFIDEAYYLYRPDNERDYGQEAIEILLQVMENNRDDLVVILAGYADRMDRFFESNPGFRSRIAHHIDFPDYDNGELLSIAESMLSRQGYRFDSKASAVMSDYIARRRRQPHFANARSIRNALDRARLRQANRLFEESAGPVDAEQLSTITARDIAASRVFATVEPSHTETSP

SEQ ID NO: 1974 - protein, 496 aa, Musa acuminata
MRTNPTTSSPVVSTLEETNLGRIAQIIGPVLDVVFPPGKMPNIYNALVVKGRDTIGQQINVTCEVQQLLGNNRVRAVAMSATDGLMRGMEVIDTGAPLSVPVGGATLGRIFNVLGEPVDNLGPVDTSTTSPIHRPAPAFIQLETKLSIFETGIKVVDLLAPYRRGGKIGLFGGAGVGKTVLIMELINNIAKAHGGVSVFGGVGERTREGNDLYMEMKESGVINEKNIAESKVALVYGQMNEPPGARMRVGLTALTMAEYFRDVNEQDVLLFIDNIFRFVQAGSEVSALLGRMPSAVGYQPTLSTEMGSLQERITSTKEGSITSIQAVYVPADDLTDPAPATTFAHLDATTVLSRGLAAKGIYPAVDPLDSTSTMLQPRIVGEEHYETAQRVKQTSQRYKELQDIIAILGLDELSEEDRLTVARARKIERFLSQPFFVAEVFTGSPGKYVGLAETIRGFQLILSGELDSLPEQAFYLVGNIDEATAKAMNLEEESKL

SEQ ID NO: 1975 - protein, 123 aa, Oryza sativa
  unsure (1)..(123): unsure at all Xaa locations
YSNSEAVVYVGCGERGNEMAEVLMDFPQLTMTLPDGREESVMKRTTLVANTSNMPVAAREASIYTGITIAEYFRDMGYNVSMMADSTSRWAEALREISGRLVXCFLSSCYFTFLACIFVTYID

SEQ ID NO: 1976 - protein, 477 aa, Borrelia burgdorferi B31
MISKLTKIVATISDLRCEPEHIKDLHDAGVNVIRLNTAHQSHEDTIKVIDNVRKISNKIALMIDTKGPEVRTANIENPIIVKTGDKVIISTSPINEPNNFQTNYDGFVKEVPQGSKVLIDDGELEMTVVAKLPDRLICEIKNDGQIKNKKSINTPGISLKLQSVTEKDKGFIELAAKYNVDFIAHSFVRHSKDVQDVQEILTASGNPDVKIISKIENQEGIDNIEEIAKASYGIMVARGDMGVEIPAEDVPIAQLKITQTCIKYGIPVITATQMLHTMIENPRPTRAEVSDIANAILNGTDAIMLSGETAYGKYPIEAVKMMTSIAKKVEKHRKMTLYKDELFYDKSITRNYIIKCAIDATKLMDIKAIIVDSLKGKTARIMATYRASVPLFITTNSERLARELALSYGVYSNLVDNNFKRTTEFVVTSLKMLKEQGVVNDKDTVIIISGNPNRNIEKGTEFMEINTVEDAIKGRNI

SEQ ID NO: 1977 - protein, 486 aa, Barbeya oleoides
GPGVPALEKKNLGRIAQIIGPVLDVAFPPGKMPNIYNALVVKGRDTVGQQINVTCEVQQLLGNNRVRAVAMSATDGLMRGMEVIDTGAPLSVPVGGATLGRIFNVLGEPVDNLGPVDTRTTSPIHRPAPAFIQLDTKLSIFETGIKVVDLLAPYRRGGKIGLFGGAGVGKTVLIMELINNIAKAHGGVSVFGGVGERTREGNDLYMEMKESGVINEQNIAESKVALVYGQMNEPPGARMRVGLTALTMAEYFRDVNEQDVLLFIDNIFRFVQAGSEVSALLGRMPSAVGYQPTLSTEMGTLQERITSTKEGSITSIQAVYVPADDLTDPAPATTFAHLDATTVLSRGLAAKGIYPAVDPLDSTSTMLQPRIVGEEHYETAQRVKQTLQRYKELQDIIAILGLDELSEEDRLTVARARKIERFLSQPFFVAEVFTGSPGKYVGLAETIRGFKLILSGELDGLPEQAFYLVGNIDEATAKATNLEMES

SEQ ID NO: 1978 - protein, 324 aa, Oryza sativa
  unsure (1)..(324): unsure at all Xaa locations
VAMAFTTMKASPMSASSSSAPVLRRCVAQPARVAAARRLAAAAASVALEASPVPAAAAAAVGGACXVSQTMSKLKEKGKTAFIPYITAGDPDMGTTAEALRLLDACGADVIELGVPFSDPYADGPVIQASASRALAAGATPEAVLSMLKEVTPELSCPVVLLSYLGPILRRGAANFTAAGVSGLIVPDLPYVDTCTFRSEAIKSNLELVLLTTPATPGERMKIITEASGGFVYLVSVNGVTGPRPKVNTRVEHLLQDIKLVTDKAVCVGFGISTPDHVRQIAGWGADGVIIGSAMVRQLGEAASPKQGLKRLEEYARRMKDALP

SEQ ID NO: 1979 - protein, 291 aa, Glycine max
IRLEGHNRTEIVKFLLDWQGADKVEMEAKNMYGETPLHMAAKNGCNKAAQLLLARGAIVEARANNGMTPLHLAVWYSLRAEEFLTVKTLLEYNADCSAKDDEGMTPLNHLSQGPGTEKLRELLLWHLEEQRKQRAIEACSETKAKMDELEKQLSNIVGLNDLKVQLRKWAKGMLLDEKRRSLGLHVGRRRPPHMAFLGNPGTGKTMVARILGKLLHTVGILPTDKVTEVQRTDLVGEFVGHTGPKTRRKIKEAEGGILFVDEAYRLIPMQKSDDKDYGLEALEEIMSVMDS

SEQ ID NO: 1980 - protein, 470 aa, Salmonella typhimurium LT2
MKKTKIVCTIGPKTESEEMLSKMLDAGMNVMRLNFSHGDYAEHGQRIQNLRNVMSKTGKKAAILLDTKGPEIRTIKLEGGNDVSLKAGQTFTFTTDKSVVGNNEIVAVTYEGFTSDLSVGNTVLVDDGLIGMEVTAIEGNKVICKVLNNGDLGENKGVNLPGVSIALPALAEKDKQDLIFGCEQGVDFVAASFIRKRSDVVEIREHLKAHGGENIQIISKIENQEGLNNFDEILEASDGIMVARGDLGVEIPVEEVIFAQKMMIEKCIRARKVVITATQMLDSMIKNPRPTRAEAGDVANAILDGTDAVMLSGESAKGKYPLEAVSIMATICERTDRVMNSRLDYNNDSRKLRITEAVCRGAVETAEKLEAPLIVVATQGGKSARAVRKYFPDATILALTTNEVTARQLVLSKGVVSQLVKEINSTDDFYRLGKDVALQSGLAQKGDVVVMVSGALVPSGTTNTASVHVL

SEQ ID NO: 1981 - protein, 489 aa, Carallia brachiata
  unsure (1)..(489): unsure at all Xaa locations
XXGVXXXXXXDPXRXVXXIGPVLXVAFPPGQMPNIYNALVVKGQDTVGQQINVTCEVQQLLGNNRVRAVAMSATDGLMRGMEVIDTGAPLSVPVGGATLGRIFNVLGEPVDDLGPVNSRTTSPIHRSAPAFIQLDTKLSIFETGIKVVDLLAPYRRGGKIGLFGGAGVGKTVLIMELINNIAKAHGGVSVFGGVGERTREGNDLYMEMKESGVINEENIEESKVALVYGQMNEPPGARMRVGLTALTMAEYFRDVNEQDVLLFIDNIFRFVQAGSEVSALLGRMPSAVGYQPTLSTEMGSLQERITSTKEGSITSIQAVYVPADDLTDPAPATTFAHLDATTVLSRGLAAKGIYPAVDPLDSTSTMLQPQIVGEEHYETAQRVKQTLQRYKELQDIIAILGLDELSEEDRLTVARARKIERFLSQPFFVAEVFTGSPGKYVGLAETIRGFKLILSGELDSLPEQAFYLVGNIDEATAKATNLEXEXXLK

SEQ ID NO: 1982 - protein, 476 aa, Calodendrum capense
LAKKNPGHIAQIIGPVLDVAFPPGKMPNIYNALVVKGRDTVGQPINVTCEVQQLLGNNRVRAVAMSATDGLTRGMEVIDTGAPLSVPVGGVTLGRIFNVLGEPVDNLGPVDTRTTSPIHKSAPAFIQLDTRLSIFETGIKVVDLLAPYRRGGKIGLFGGAGVGKTVLIMELINNIAKAHGGVSVFGGVGERTREGNDLYMEMKESGVINEQNIAESKVALVYGQMNEPPGARMRVGLTALTMAEYFRDVNEQDVLLFIDNIFRFVQAGSEVSALLGRMPSAVGYQPTLSTEMGSLQERITSTKEGSITSIQAVYVPADDLTDPAPATTFAHLDATTVLSRGLAAKGIYPAVDPLDSTSTMLQPRIVGEEHYETAQRVKQTLQRYKELQDIIAILGLDELSEEDRLTVARARKIERFLSQPFFVAEVFTGSPGKYVGLAETIRGFKLILSGELDGLPEQAFYLVGNIDEVTAKATNL

SEQ ID NO: 1983 - protein, 498 aa, Donatia sp. Morgan 2142
  unsure (1)..(498): unsure at all Xaa locations
XXXNPTTSGSGVSTLEKKNPGRIVQIIGPVLDVAFPPDKMPNIYNALVVKGRDTVGQPINVTCEVQQLLGNNRVRAVAMSATDGLMRGMEVIDTGAPLSVPVGGATLGRIFNVLGEPVDNLGPVDTRTTSPIHRSAPAFIQLDTKLSIFETGIKVVDLLAPYRRGGKIGLFGGAGVGKTVLIMELINNIAKAHGGVSVFGGVGERTREGNDLYMEMKESGVINEENIAESKVALVYGQMNEPPGARMRVGLTALTMAEYFRDVNEQDVLLFIDNIFRFVQAGSEVSALLGRMPSAVGYQPTLSTEMGSLQERITSTKEGSITSIQAVYVPADDLTDPAPATTFAHLDATTVLSRGLAAKGIYPAVDPLDSTSTMLQPRIVGEEHYETAQRVKQTLQRYKELQDIIAILGLDELSEDDRLTVARARKIERFLSQPFFVAEVFTGSPGKYVGLAETIRGFQLILSGELDGLPEQAFYLVGNIDEATAKAMNLEMETNLKK

SEQ ID NO: 1984 - protein, 439 aa, Campylobacter jejuni subsp. jejuni NCTC 11168
MNLTPKEIVKFLDDYVIGQKKAKKIIAIALRNRYRRMQLSPELQDDIVPKNILMIGSTGVGKTEIARRLAKMMGFPFIKIEASKYTEVGFVGRDVESMVRDLANAALNLVKNEQREKNKDKIDEFIENKILEKLLPPLPKGISDEKQEEYKNSLEKMRTKLRNGDLDESTIEIEISQNMFDTNPNLPPEMGAMQDIVKVIGVGSKKVKKEMKIKDAKNALKNEAGEKILDQESIKSEALKRAENEGIIFIDEIDKIAVSSGNSNRQDPSKEGVQRDLLPIVEGSNVQTKIGTLKTDHILFIAAGAFHLSKPSDLIPELQGRFPLRVELDSLDDKALYEILTRPKNSLLKQYSQLLKTENLELEFDDEAIKEIAKIASRANEEMQDIGARRLHTVIEKLLEDLSFEADEYAGKKFVVDKKMVEEKLGDIIENKDLARYIL

SEQ ID NO: 1985 - protein, 498 aa, Eucnide bartonioides
  unsure (1)..(498): unsure at all Xaa locations
XXXXXXXXXXXXXXXXXXXXXXXXXXXXXXXXXXXPPGKMPNIYNALVVKGRDTVGQPINVTCEVHQLLGNNRVRAVAMSATDGLMRGMEVIDTGAPLSVPVGGATLGRIFNVLGEPVDNLGPVDTRTTSPIHRSAPAFIQLDTKLSIFETGIKVVDLLAPYRRGGKIGLFGGAGVGKTVLIMELINNIAKAHGGVSVFGGVGERTREGNDLYMEMKESGVINEQNIAESKVALVYGQMNEPPGARMRVGLTALTMAEYFRDVNEQDVLLFIDNIFRFVQAGSEVSALLGRMPSAVGYQPTLSTEMGSLQERITSTKEGSITSIQAVYVPADDLTDPAPATTFAHLDATTGLSRGLAAKGIYPAVDPLDSTSTMLQPRIVGEEHYETAQRVKQTLQRYKELQDIIAILGLDELSEEDRLTVARARKIERFLSQPFFVAEVFTGSPGKYVGLAETIRGFQLILSGELDGLPEQAFYLVGNIDEATAKAMNLEMESNLKK

SEQ ID NO: 1986 - protein, 265 aa, Trichodesmium erythraeum IMS101
MISVSDCFESLRNNSSQCALIPFITAGDPDLETTAKALEVLDRSGANMIELGVPYSDPLADGPVIQAAATRSLNRGTTLESVLEVVQTVSPKLRSPIILFTYYNPILYRGVENFLKKIYDVGARGLVVPDLPLEEADILLEPAKDIGIELTLLVAPTSPKERIKAIAHQSQGFIYLVSVTGVTGMRAQMQTRVEDLLAQMREVTDKPIGVGFGISQPEQALQVKKWGSDAVIVGSAVVKRLAEGSPDEGLKAIGEFCQNLKAAIN

SEQ ID NO: 1987 - protein, 1101 aa, Saccharomyces castellii
DNLESDYGSIYSVSGPVIVAENMIGCAMYELVKVGHDNLVGEVIRIDGDKATIQVYEETAGVTVGDPVLRTGKPLSVELGPGLMETIYDGIQRPLKAIKDMSQSIYIPRGIDAPALDRKITWNFTPGKYTVGDHISGGDIFGSIFENSLLSDHKILLPPRARGTITWIAPAGEYTVDEKILEVEFDGVKSDYSMYHTWPVRVPRPVAEKLSADYPLLTGQRVLDALFPCVQGGTTCIPGAFGCGKTVISQSLSKYSNSDSIIYVGCFAKGTEVLMADGSDKAIEAIEVGEQVMGKDGAPRTVIALPRGTETMYEVCHTTQHRNGNEKFGLMNYVCSGNHKLVLRTPQLIRTTIHELRGKHYTSVTFFVTEKSANGTIVKQRTKTFQHEFHGGEEAATKLAADFASTIDPKHIDWDIEAKDYKQLDHYVKKSSYQMINPVFKESGNLANILGDAGIEKTLAAKMAWLLGFWVGNGHMETAQFPVDSWDTQLVDRISEYGKHFNLTTTTENHYRSNHVESNKDIEIFEMNEAQIEEAEQTGVVAFDSNRKGDPSETELIEAEIFNESRPSTAGLFTPAAISPASLVTDLSVTLRGTGIGGAGVSKERNLNNIFWDIVTSFGVRTNGQGSTYEKSVPLHLSYDDIEVREQFIAGLIDSDGYVKSADNRFSATVTTIYKGVSEGLIRLARSLGIRVSVSTEKEHVDKNNVKHKSCYRVFLSGEALIGVLRFCALDRKRTAFKEFTREAVPFYFTLQEKDQDEYYGITLPDETDKQYLLSSLALVHNCGERGNEMAEVLMEFPELFTEKDGRKEPIMKRTTLVANTSNMPVAAREASIYTGITLAEYFRDQGKDVSMIADSSSRWAEALREISGRLGEMPADQGFPAYLGAKLASFYERAGKAVALGSPDRIGSVSIVAAVSPAGGDFSDPVTTATLGITQVFWGLDKKLAQRKHFPSINTSVSYSKYTNALNKYYDSNYAEFPVLRDRIKEILSNAEELEQVVQLVGKSALSDSDKITLDVSNLIKEDFLQQNGYSTYDAFCPIWKTFDMMRAFVSYYDESQKAVANGANWSKLSEATSDVKHAVSSSKFFEPSRGEEEIHGEFE

SEQ ID NO: 1988 - protein, 470 aa, Shigella flexneri 2a str. 2457T
MKKTKIVCTIGPKTESEEMLAKMLDAGMNVMRLNFSHGDYAEHGQRIQNLRNVMSKTGKTAAILLDTKGPEIRTMKLEGGNDVSLKAGQTFTFTTDKSVIGNSEMVAVTYEGFTTDLSVGNTVLVDDGLIGMEVTAIEGNKVICKVLNNGDLGENKGVNLPGVSIALPALAEKDKQDLIFGCEKGVDFVAASFIRKRSDVIEIREHLKAHGGENIHIISKIENQEGLNNFDEILEASDGIMVARGDLGVEIPVEEVIFAQKMMIEKCIRARKVVITATQMLDSMIKNPRPTRAEAGDVANAILDGTDAVMLSGESAKGKYPLEAVSIMATICERTDRVMNSRLEFNNDNRKLRITEAVCRGAVETAEKLDAPLIVVATQGGKSARAVRKYFPDATILALTTNEKTAHQLVLSKGVVPQLVKEITSTDDFYRLGKELALQSGLAHKGDVVVMVSGALVPSGTTNTASVHVL

SEQ ID NO: 1989 - protein, 664 aa, Oryza sativa
LTVERESRLPLRFSSPPRDLTAGDDPLRPPGARRAPPPSPATTTVWYDRVTTFEDSEKESEYGYVRKVSGPVVVADGMGGAAMYELVRVGNDNLIGEIIRLEGDSATIQVYEETAGLMVNDPVLRTRKPLSVELGPGILGNIFDGIQRPLKTIAIKSGDVYIPRGVSVPALDKDQLWDFEPKKLGVGDTITGGDLYAIVNENTLMQHHVALPPGSMGKMSYIAPAGQYSLQDTVLELEFQGIKKQFTMLQTWPVRSPRPVSSKLAADTPLLTGQRVLDALFPSVLGGTCAIPGAFGCGKTVISQALSKYSNSEAVVYVGCGERGNEMAEVLMDFPQLTMTLPDGREESVMKRTTLVANTSNMPVAAREASIYTGITIAEYFRDMGYNVSMMADSTSRWAEALREISGRLAEMPADSGYPAYLAARLASFYERAGKVKCLGSPDRTGSVTIVGAVSPPGGDFSDPVTSATLSIVQVFWGLDKKLAQRKHFPSVNWLISYSKYSKALESFYEKFDQDFIDIRTKAREVLQREDDLNEIVQLVGKDALAESDKITLETAKLLREDYLAQNAFTPYDKFCPFYKSVWMMRNIIHFNTLANQAVERAANADGQKITYSVIKHRMGDLFYRLVSQKFEDPAEGEDVLVAKFQKLYDDLTTGFRNLEDEAR

SEQ ID NO: 1990 - protein, 242 aa, Staphylococcus aureus subsp. aureus Mu50
MTKLFIPYIMGNKDLIENATLLSENGADIIEIGVPFSDPVADGPVIMEAGQQAIKQGITIDYIFNQLEKHGDQIKCNYVLMTYYNIICHYGEQAFFEKCRDTGVYGLIIPDLPYELSQRLKQQFSHYGVKIISLVAMTTDDKRIKDIVSHAEGFIYTVTMNATTGQNGAFHPELKRKIESIKAIANVPVVAGFGIRTPQHVADIKEVADGIVIGSEIVKRFKSNTREEIIRYLQSIQQTLNN

SEQ ID NO: 1991 - protein, 964 aa, Pyrococcus horikoshii
MVAKGRIIRVTGPLVVADGMKGAKMYEVVRVGELGLIGEIIRLEGDKAVIQVYEETAGVRPGEPVVGTGASLSVELGPGLLTSIYDGIQRPLEVIREKTGDFIARGVTAPALPRDKKWHFIPKAKVGDKVVGGDIIGEVPETSIIVHKIMVPPGIEGEIVEIAEEGDYTIEEVIAKVKTPSGEIKELKMYQRWPVRVKRPYKEKLPPEVPLITGQRVIDTFFPQAKGGTAAIPGPFGSGKCVDGDTLVLTKEFGLIKIKELYEKLDGKGRKIVEGNEEWTELEKPITVYGYKDGKIVEIKATHVYKGVSSGMVEIRTRTGRKIKVTPIHRLFTGRVTKDGLILKEVMAMHVKPGDRIAVVKKIDGGEYIKLDSSNVGEIKVPEILNEELAEFLGYLMANGTLKSGIIEIYCDDESLLERVNSLSLKLFGVGGRIVQKVDGKALVIQSKPLVDVLRRLGVPEDKKVENWKVPRELLLSPSNVVRAFVNAYIKGKEEVEITLASEEGAYELSYLFAKLGIYVTISKSGEYYKVRVSRRGNLDTIPVEVNGMPKVLPYEDFRKFAKSIGLEEVAENHLQHIIFDEVIDVRYIPEPQEVYDVTTETHNFVGGNMPTLLHNTVTQHQLAKWSDAQVVIYIGCGERGNEMTDVLEEFPKLKDPKTGKPLMERTVLIANTSNMPVAAREASIYTGITIAEYFRDMGYDVALMADSTSRWAEALREISGRLEEMPGEEGYPAYLASKLAEFYERAGRVVTLGSDYRVGSVSVIGAVSPPGGDFSEPVVQNTLRVVKVFWALDADLARRRHFPAINWLTSYSLYVDAVKDWWHKNIDPEWKAMRDKAMALLQKESELQEIVRIVGPDALPERERAILLVARMLREDYLQQDAFDEVDTYCPPEKQVTMMRVLLNFYDKTMEAINRGVPLEEIAKLPVREEIGRMKFERDVSKIRSLIDKTNEQFEELFKKYGA

SEQ ID NO: 1992 - protein, 489 aa, Acicarpha tribuloides
GSGVSTLEKKNLGRIAQIIGPVLDVAFPPGKMPNIYNALVVKGRDTVGQPINVTCEVQQLLGNNRVRAVAMSATDGLMRGMEVVDTGAPLSVPVGGATLGRIFNVLGEPVDNLGPVDTRTTSPIHRSAPAFIQLDTKLSIFETGIKVVDLLAPYRRGGKIGLFGGAGVGKTVLIMELINNIAKAHGGVSVFGGVGERTREGNDLYMEMKESGVINEQNIAESKVALVYGQMNEPPGARMRVGLTALTMAEYFRDVNEQDVLLFIDNIFRFVQAGSEVSALLGRMPSAVGYQPTLSTEMGSLQERITSTKEGSITSIQAVYVPADDLTDPAPATTFAHLDATTVLSRGLAAKGIYPAVDPLDSTSTMLQPRIVGEEHYEIAQRVKQTLQRYKELQDIIAILGLDELSEEDRLTVARARKIERFLSQPFFVAEVFTGSPGKYVGLAETIRGFQLILSGELDGLPEQAFYLVGNIDEATAKAMNLEMESNLK

SEQ ID NO: 1993 - protein, 433 aa, Rhodobacter sphaeroides
MTDLTPREIVSELDRFIIGQKEAKRAVAVALRNRWRRKQLADDLRDEVYPKNILMIGPTGVGKTEISRRLARLAKAPFLKVEATKFTEVGYVGRDVDSIIRDLVDAAIVETRARMREDVKARAAKAAEDRVIEAVAGRDAREQTREMFRGKLKRGELDSTVIEIDVADTSNPMQMLDPTGQGQMGMMNLGEIFGKAFGGRTQRRKMTVAESHDILMNEEADKLLDDEVVKATALEAVQQNGIVFIDEIDKVCARSDMRGADVSREGVQRDLLPLIEGTTVSTKYGPVKTDHILFIASGAFHIAKPSDLLPELQGRLPIRVELRALTEEDFVRILSETDNALTLQYKALMQTEKVGITFTEDGIAALASIAAEVNRSVENIGARRLYTVMERVFEELSFHAPDRSGEEVTVDAAYVEKNLGELARSSDLSRYVL

SEQ ID NO: 1994 - protein, 428 aa, Xanthomonas axonopodis pv. citri str. 306
MSEDRQGRSGDSNKILYCSFCGKSQHEVRKLIAGPSVFICDECVELCNDIIREELEEKAQSARSSLPKPREILEVLDQYVIGQLRAKRTLAVAVYNHYKRIESRSKNDDVELAKSNILLVGPTGSGKTLLAETLARLLNVPFTIADATTLTEAGYVGEDVENIIQKLLQKCDYDVEKAQQGIVYIDEIDKISRKSENPSITRDVSGEGVQQALLKLIEGTVASVPPQGGRKHPQQEFLQVDTKNILFICGGAFAGLDKVIQQRSNDAGGIGFGAKVKSSERKQEVGKILAEVEPEDLIKFGLIPEFVGRLPVVATLEELDEPALIKILTEPKNAITKQFKKLFDMEGVELEFRPDALSAIAKKALKRKTGARGLRTIVESVLLDTMYELPSQENVSKVVVDESVIEHKSEPYLIYQAQPAPAKAASGD

SEQ ID NO: 1995 - protein, 486 aa, Asparagus officinalis
  unsure (1)..(486): unsure at all Xaa locations
SNPTTSGPTVSTXEEKSXGRIAQIIGPVLDVVFPPGKLPXIYNALVVKGRDTAGQQINVTCEVQQLLGNNRVRAVAMSATDGLTRGMEVIDTGAPLSVPVGGATLGRIFNVLGEPVDNLGPVDTRTTSPIHRSAPAFIQLDTKLSIFETGIKVVDLLAPYRRGGKIGLFGGAGVGKTVLIMELINNIAKAHGGVSVFGGVGERTREGNDLYMEMKESGVINEKNIAESKVALVYGQMNEPPGARMRVGLTALTMAEYFRDVNEQDVLLFIDNIFRFVQAGSEVSALLGRMPSAVGYQPTLSTEMGSLQERITSTKEGSITSIQAVYVPADDLTDPAPATTFAHLDATTVLSRGLAAKGIYPAVDPLDSTSTMLQPRIVGEEHYETAQRVKETLQRYKELQDIIAILGLDELSEEDRLTVARARKIERFLSQPFFVAEVFTGSPGKYVGLAETIRGFQLILSGELDVXPEQAFYLVGNIDEATAKAM

SEQ ID NO: 1996 - protein, 423 aa, Tropheryma whipplei str. Twist
MTDDTEYRCSFCGKEHHQVDDLIAGPDVRICSECVVLSCEIVEDRRNEALAKQDAFIKRKQRSVLEGLPKPAEIYAFLDEYVIGQQKAKRDLSVAVYNHYKRLVSTKSESENEVELSKSNILLIGPTGCGKTYLAQTLARMLRVPFAVADATALTEAGYVGDDVENVLLKLLQDADFDITRAEAGIVCIDEIDKISRKADSPSITRDVSGEGVQQALLKILEGTVASVPLQGGKKHTQYEQASINTRNILFIVAGAFSGIEEIISSRIGRSNMGFGSDLLRKDTDVFDQILPEDLRKFGLIPEFIGRLPIVTAISHLDGEDMIRVLTEPKNALVKQYKRLFSLDGVSLGFDHEALEAIVELALKRKTGARALRSVMESILSPIMFDVPSRGDIESVRITAETVAGGGPHLTMRCARSNYIRSA

SEQ ID NO: 1997 - protein, 472 aa, Mycobacterium tuberculosis H37Rv
MTRRGKIVCTLGPATQRDDLVRALVEAGMDVARMNFSHGDYDDHKVAYERVRVASDATGRAVGVLADLQGPKIRLGRFASGATHWAEGETVRITVGACEGSHDRVSTTYKRLAQDAVAGDRVLVDDGKVALVVDAVEGDDVVCTVVEGGPVSDNKGISLPGMNVTAPALSEKDIEDLTFALNLGVDMVALSFVRSPADVELVHEVMDRIGRRVPVIAKLEKPEAIDNLEAIVLAFDAVMVARGDLGVELPLEEVPLVQKRAIQMARENAKPVIVATQMLDSMIENSRPTRAEASDVANAVLDGADALMLSGETSVGKYPLAAVRTMSRIICAVEENSTAAPPLTHIPRTKRGVISYAARDIGERLDAKALVAFTQSGDTVRRLARLHTPLPLLAFTAWPEVRSQLAMTWGTETFIVPKMQSTDGMIRQVDKSLLELARYKRGDLVVIVAGAPPGTVGSTNLIHVHRIGEDDV

SEQ ID NO: 1998 - protein, 402 aa, Lamprothamnium macropogon
LLGDNKVRAVAMSATDGLMRGMEVIDTGAPLSVPVGETTLGRIFNVLGEPVDNLGPVDTTITFPIHRAAPAFTQLDTQLSIFETGIKVVDLLAPYRRGGKIGLFGGAGVGKTVLIMELINNIAKAHGGVSVFGGVGERTREGNDLYMEMKESKVINEENISESKVALVYGQMNEPPGARMRVGLTALTMAEYFRDVNKQDVLLFIDNIFRFVQAGSEVSALLGRMPSAVGYQPTLSTEMGTLQERITSTKEGSITSIQAVYVPADDLTDPAPATTFAHLDATTVLSRNLAAKGIYPAVDPLDSTSTMLQPWIVGEEHYETAQGVKETLQRYKELQDIIAILGLDELSEEDRLIVARARKIERFLSQPFFVAEVFTGSPGKYVSLIDTIKGFQMILSGELDHL

SEQ ID NO: 1999 - protein, 245 aa, Sulfolobus tokodaii
MRRMLVTYMTLGYPNLESFYQFIEKSVELGTDILEIGLPPKYAKYDGPVIRKSYKAVTSWLKDYITPLKEVRKKVNIPIIILTYLEDYLSNLDNFLTTLHEIGIDGVLFPDLLIDFIDEYEEYVSKIKGKGVKAVLFTGPSLPDNLIIKASRISDIFLYYGVRPTTGIIIPVSVDSLITRVRNLVQNKLVVGFGLNDFNDLRKALSAGADGVAIGTAFIEEIEKNGIQSALHLVKTIRGILDEYS

SEQ ID NO: 2000 - protein, 237 aa, Neurospora crassa
MSLPNPDNRPLLIGPPTGPEAPFPFRMEGEVISGFGRGSKELGIPTANLPVDDENAWIKNIDSGIYFGWASLKLPASHPNSVLYQKPPTSEPVMMDPVQQQQQQQQQQRNQQQQQEGGVGSAQQEKLVDQETGQWQIYPMVMSIGYNPFYKNTVRSAEVHVLGEFAADFYGVGMRLLITGFIRNEKDYSGLEALIADIHFDCEVARHSLARKGWRVRELGVKEGEEEGELDGSWLVR

SEQ ID NO: 2001 - protein, 496 aa, Monocostus uniflorus
MRINPTTSSPAVSTLEEQNLGRTAQIIGPVLDVVFPPGKMPNIYNALVVKGRDTVGQQINVTCEVQQLLGNNRVRAVAMSATDGLMRGMEVIDTGAPLSVPVGGATLGRIFNVLGEPVDNLGPLDTSTTSPIHRPAPAFIQLDTKLSIFETGIKVVDLLAPYRRGGKIGLFGGAGVGKTVLIMELINNIAKAHGGVSVFGGVGERTREGNDLYMEMKESGVINEKNIAESKVALVYGQMNEPPGARMRVGLTALTMAEYFRDVNEQDVLLFIDNIFRFVQAGSEVSALLGRMPSAVGYQPTLSTEMGSLQERITSTKEGSITSIQAVYVPADDLTDPAPATTFAHLDATTVLSRGLAAKGIYPAVDPLDSTSTMLQPRIVGEEHYETAQRVKQTSQRYKELQDIIAILGLDELSEEDRLTVARARKIERFLSQPFFVAEVFTGSPGKYVGLAETIRGFQLILSGELDSLPEQAFYLVGNIDEATAKAMNLEGESKL

SEQ ID NO: 2002 - protein, 142 aa, Magnetospirillum magnetotacticum
  unsure (1)..(142): unsure at all Xaa locations
GRRASPSSASPPPPPTTAVSXGGAPRTRAGFVYYVSITGVTGTATPDFGRVSQAVARIAAHTDLPVVVGFGVKTGAHAAEIARGADGVVVGSALVDALARSLETGDRAGSGTVEAVASLVRELAEGVRSTAKTPAETAARGA

SEQ ID NO: 2003 - protein, 379 aa, Arabidopsis thaliana
MSMSNSLKKLSSCVLIDLDGTLINTDGVVGDILRKYLCKYGKQWDGRESLKIVGKTPVEAATTIVEDYELPCKVDEFNSEFYPLFSAQMDKIKSLPGANRLIRHLKCHGVPVALASNSSRANIESKISYHEGWKECFSVIVGSDEVSKGKPSPDIFLEAAKRLKKDPADCLVIEDSVPGVMAGKAAGTKVIAVPSLPKQTHLYTSADEVINSLLDIRLEKWGLPPFQDWIENTLPIDPWHIGGPVIKGFGRGSKVLGIPTANLSTKDYADELVEHPSGVYFGWAGLAKRGVFKMVMSIGWNPYFNNKEKTIEPWLLHDFTEDFYGEELRLIIVGYIRPEANFSSLESLIAKIHEDREVAEKALDLPSYAKFKGDPYLTK

SEQ ID NO: 2004 - protein, 318 aa, Clostridium tetani E88
MNMDIIEEEIKTKYNLDIYVALGSFDGLHLGHMKLIDKAIKLAKENNGKSMVYTFKNHPLGVINENLAPKLLMDNSTKIEVLKNKGVDILRFICFDKNFMEISPEDFILNIIKQYNIKGIVVGFNFRFGHKNSGDVELLKELSKKYDFQLFIVGPVEYNDEVVSSSRIRKTISEYGNVEEAKEMLPHPYFLEGNVIKGRQIGRKMGFPTINLNYNKDFVIPKNGVYFTGVLYNSKFYKGITNIGYNPTVKSKKLNIETHVLNFNEEIYGEKIRLYFLSRLRNEKKFKSLEELSLTIKKDKGYVNKQSLDLIVKNNLQI

SEQ ID NO: 2005 - protein, 583 aa, Thermoanaerobacter tengcongensis
MRRTKIVCTIGPASEDYNILRKLIEKGMNVARLNFSHGDFEEHGARIDNIKKIREELGLPVAILLDTKGPEIRTGKFKNGGVELKEGQTFTLTTRDVIGDETVVSVSYKGLPQDVSRGTQILIDDGLISLRVVDVKGEDIICVVENSGFLGDHKGVNVPGVKLNLPALTQKDIEDIEFGIKKGIDMIAASFVRKAADVLAIRRLLEDNKADHIQIIAKIENREGVENIDEIIRVSDGIMVARGDLGVEIPLEEIPIVQKMIIKKCNEAGKPVITATQMLDSMMRNPRPTRAEVTDVANAILDGTDAIMLSGETAQGKYPVEAFETMARIAEKTEVYVQYRDIVGVGTERNVSITNAISHATCTTARDIGASAIITCTKSGYTARMVSRYRPSSPIIATTPSEQVARKLSIVWGVYPLVTKEVSTTDEMIDVAIESALKAGLIRNGDIVVISAGIPVAMTGTTNMLKVHIVGDVILRGIGIGSKSTTGTVCIIHDIGKDRDKFREGDIIVTTKTERDFMPLIEKASAIITEEGGLTSHAAIVGLNLGIPVIVGCEGATSKLQDGMTVTVDTTRGLVYKGIVNIK

SEQ ID NO: 2006 - protein, 475 aa, Acorus calamus
  unsure (1)..(475): unsure at all Xaa locations
INPTXSGSAVXSXDEKNLGRIXKFIGPVXDVAFPPGKMPNIYNALVVKGRDTAGQPINVTCEVQQLLGNNRVRAVAMSATDGLTRGMEVIDTGAALSVPVGGATLGRIFNVLGEPVDNLGPVDTRTTSPIHRSAPAFIQLDTKLSIFXTGIKVVDLLAPYRRGGKIGLFGGAGVGKTVLIMELINNIAKAHGGVSVFGGVGERTREGNDLYMEMKESGVINEEKIEESKVALVYGQMNEPPGARMRVGLTALTMAEYFRDVNEQDVLLFIDNIFRFVQAGSEVSALLGRMPSAVGYQPTLSTEMGSLQERITSTKRGSITSIQAVYVPADDLTDPAPATTFAHLDATTVLSRGLAAKGIYPAVDPLDSTSTMLQPRIVGEGHYETAQRVKQTLQRYKELQDIIAILGLDELSEEDRLTVARARKIERFLSQPFFVAEVFTGSPGKYVGLAETIRGFQLILSGELDVXPEQAFXLV

SEQ ID NO: 2007 - protein, 228 aa, Brucella suis 1330
MAAPSLIIFDCDGVLVDSEIIAAEVESALLTESGYPIAADEMAERFAGLTWQDILLTVEREAGIPLSASLLDKSERILDEKLKNEVNAVEDIVEVVSALKLPKCICSNSTSLRLENMLKRVGLYELFAPNIFSAKEVGSGKTKPAPDVFLHAARHFGVDPANVLVIEDSVHGVHGARAAGMRVIGFTGGAHTYPGHADKLTDAGAETVIHRHKDLQSVIDALSIWTDA

SEQ ID NO: 2008 - protein, 485 aa, Chlamydia trachomatis
MIARTKIICTIGPATNTPEMLEKLLDAGMNVARLNFSHGTHESHGRTIAILKELREKRQVPLAIMLDTKGPEIRLGQVESPIKVQPGDRLTLVSKEILGSKESGVTLYPSCVFPYVRERAPVLIDDGYIQAVVVNAQEHMVEIEFQNSGEIKSNKSLSIKDIDVALPFMTEKDIADLKFGVEQELDLIAASFVRCNEDIDSMRKVLESFGRPNMPIIAKIENHLGVQNFQEIARAADGIMIARGDLGIELSIVEVPGLQKFMARASRETGRFCITATQMLESMIRNPLPTRAEVSDVANAIYDGTSAVMLSGETALGAHPVHAVKTMRSIIQETEKTFDYHAFFQLNDKNSALKVSPYLEAIGFSGIQIAEKASAKAIIVYTQTGGSPMFLSKYRPYLPIIAVTPNRNVYYRLAVEWGVYPMLTLESNRTVWRHQACVYGVEKGILSNYDKILVFSRGAGMQDTNNLTLTTVHDVLSPSLDEIVP

SEQ ID NO: 2009 - protein, 224 aa, Streptococcus pneumoniae
MPKTLTEKLNAIKAAGKGIFVPYIMAGDHEKGLDGLGETIHFLEDLGVSAIEVGIPFSDPVADGPVIEEAGLRSLAHGTSTQALVETLKTIKTEIPLVIMTYFNPLFQYGVENFVKDLADTAVKGLIIPDLPHEHANFVEPFLADTDITLIPLVSLTTGIERQKELIEGAEGFVYAVAINGVTGKSGNYRADLDKHLAQLHQVADIPVLTGFGVSSQADLERFN

SEQ ID NO: 2010 - protein, 91 aa, Kluyveromyces thermotolerans
ISQSLSKYSNSDAIVYVGCGERGNEMAEVLMEFPELFTERNGKKEPIMKRTTLVANTSNMPVAAREASIYTGITLAEYFRDQGKDIAMIAD

SEQ ID NO: 2011 - protein, 490 aa, Opisthiolepis heterophylla
DPGVSTLEEKNLGRIAQIIGPVLDVAFPPGKMPNIYNALVVKGRDTVGQQINVTCEVQQLLGNNRVRAVAMSATDGLMRGMEVIDTGAPLSVPVGGATLGRIFNVLGEPVDNLGPVDTRTTSPIHRSAPAFIQLDTKLSIFETGIKVVDLLAPYRRGGKIGLFGGAGVGKTVLIMELINNIAKAHGGVSVFGGVGERTREGNDLYMEMKESGVINEQNIAESKVALVYGQMNEPPGARMRVGLTALTMAEYFRDVNEQDVLLFIDNIFRFVQAGSEVSALLGRMPSAVGYQPTLSTEMGSLQERITSTKEGSITSIQAVYVPADDLTDPAPATTFAHLDATTVLSRGLAAKGIYPAVDPLDSTSTMLQPRIVGEEHYEIAQRVKQTLQRYKELQDIIAILGLDELSEEDRLTVARARKIERFLSQPFFVAEVFTGSPGKYVGLAETIRGFQLILSGELDGLPEQAFYLVGNIDEATAKAMNLEVESNLKK

SEQ ID NO: 2012 - protein, 374 aa, Glycine max
  unsure (1)..(374): unsure at all Xaa locations
MQRLVRSLLRRRSSTIENSSPCRPNPTSSFSLQYLYPNPPFLNKNKKIKKNPSISWTSMTSLSTHHTYSRKQKSLGLLCTNFLSLYNKEGVRLVGLDDAASRLGVERRRIYDIVNVLESXGVLTRKAKNQYTWKGFXAIPAALQELKDEGLKENPGSFDDSNDNALIXYKVSEVHDEEEEEETFPNINIGSQNEKDKSSSKNENRREKSLALLTQNFVKLFVCSNFEMISLDEAAKLLLGNANNRTKVRRLYDIANVLSSMNLIEKTHTTNTRKPAFRWLGVRGKTWGGSVDLAQNSNVKESRKRMFGTDIGNISFKRNKVDLSMDGQNSKMQNQHENISPRAQLEKIIIKKDAKNDYIRADFRELSVWPLWNL

SEQ ID NO: 2013 - protein, 488 aa, Metrosideros nervulosa
  unsure (1)..(488): unsure at all Xaa locations
XNPXXXGXGVSTLEKKNLGRXVQIIGPVXDVAFPPGKMPNIYNALVVKGRDTIRSEINVTCEVQQLLGNNRVRAVAMSATDGLMRGMEVIDTGAPLSVPVGGATLGRIFNVLGEPVDDLGPVDTRTTSPIHRSAPAFIQLXTXLSIFETGIXVVDLLAPYRRGGKIGLFGGAGVGKTVLIMELINNIAKAHGGVSVFGGVGERTREGNDLYMEMKESGVINEENIAESKVALVYGQMNEPPGARMRVGLTALTMAEYFRDVNEQDVLLFIDNIFRFVQAGSEVSALLGRMPSAVGYQPTLSTEMGSLQERITSTKEGSITSIQAVYVPADDLTDPAPATTFAHLDATTVLSRGLAAKGIYPAVDPLDSTSTMLQPRIVGEEHYETAQRVKQTLQRYXELQDIIAILGLDELSEEDRLTVARARKIERFLSQPFFVAEVFTGSPGKYVGLAETIRGFNLILSGELDGLPEQAFYLVGNIDEATAXAXNL

SEQ ID NO: 2014 - protein, 432 aa, Glycine max
APFFSTDAFIGVNIGSDISDMPGPTEIVALLKAQSIQHVRLYDADQALLLALANTGIRVTVSVPNDQLLGIGQSNATAANWVTRNVIAHVPATNITAICVGSEVLTTLPNAAPILVSAINFIHSALVAANLDRQIKVSSPHSSSIILDSFPPSQAFFNRTWNPVMVPMFKFLQSTGSCLMLNVYPYYDYQQSNGVIPLDYALFRPLPPNKEAVDSNTLLHYTNVFDAVVDAAYFAMSDLNFTNIPIMVTESGWPSKGDSSEPDATVDNANTYNSNLIRHVLNNTGTPKHPGIAVSTFIYELYNEDLRSGPVSEKNWGLFYANGEPVYTLHLTGAGILFANDTTNQTFCVTKSNADPKMLQAALDWACGPGKVDCSPLLQGQPCYEPDNVVAHSTYAFNAYYQKMDKSPGSCDFKGVATVTTTDPSMAIHTPT

SEQ ID NO: 2015 - protein, 488 aa, Oryza sativa
MAGNLLANYVQVNVMLPLDVVTVHNKFEKVDETRAQLKKLTEAGVDGIMVDVWWGLVEGKGPGSYDWEAYKQLFRLVQEAGLKLQAIMSFHQCGGNVGDIVNIPIPQWVRVVGVNDPDIFYTNRGGARNIEYLTLGVDDQPLFHGRTAIQMYVDYMKSFRENMAEFLDAGVIVDIEVGLGPAGEMRYPSYPQSQGWVFPGIGEFICYDKYLEADFKAEAAKAGHPEWELPDDAGEYNDTPEKTRFFTDNGTYVTEKGKFFLTWYSNKLIKHGDKILDEANKVFLGCRVQLAIKISGIHWWYRVPNHAAELTAGYYNLDNRDGYRTIARMLTRHRACVNFTCAEMRDSEQSSEAKSAPEELVQQVLSAGWREGLHVACENALGRYDATAYNTILRNSRPHGINKNGPPEYKLFGFTYLRLSDELLEGQNYSTFKTFVKRMHANLVSATNVDPLEPLQRSMPEMPIGKILQAAHPKLAPFPFDENTDLPV

SEQ ID NO: 2016 - protein, 472 aa, Mycobacterium intracellulare
MSRRGKIVCTLGPATNSDELILALVEAGMDVARLNFSHGDYADHKAAYERVRVASDATGRAVGVLADLQGPKIRLGRFATGPTYWADGETVRITVADCEGSHDRVSTTYKKLAEDAAVGDRVLVDDGKVCLVVDGIEGDDVICTVVEGGPVSNNKGISLPGMNVSAPALSEKDIEDLTFALDLGVDLVALSFVRSPADVELVHEVMDRVGRRVPVIAKLEKPEAVDNLETIVLAFDAIMVARGDLGVELPLEEVPLVQKRAIQMARENAKPVIVATQMLDSMIENSRPTRAEASDVANAVLDGADAVMLSGETSVGKYPMAAVRTMSRIICAVEDNSTAAPPLTHVPRTKRGVISYAARDIGERLDAKALVAFTQSGDTVKRLARLHTPLPLLAFTAWPEVRSQLAMTWGTETFIVPMMTSTGGMIRQVDKSLLELGRYKRGDLVVIVAGAPPGTVGSTNLIHVHRIGEDDV

SEQ ID NO: 2017 - protein, 391 aa, Glycine max
  unsure (1)..(391): unsure at all Xaa locations
PKYVPCNDELYRATRQIFHTSFAFKNREFPIKNGKALSFITVSKQLKTKRGVAARTAPNNVLMXAGSKCAMRALQSQCCSPDEVIFGPDFFQSLYCHLLCGLIFREKVEFVSSTFAHSIVHAFRTFDQVWEELCNDIREXVLACGATVPSIRMAMSKXVLKPNPELANTIHQKCRGLSNWYGLIPELFPNAKYIYGIMTGSMEPYLKKMRHYAGELPLLTADYGSSEGWIAANVNPQLPPEYATYAVLPHIGYFEFIPLSEFENTKGEPDFLCVDPKPMGLTEVKVGEEYEIVMTNPAGLYRYRLGDVVKVMGFHNSTPELKFIRRSSLLLNINIDKNTEKDLQLAVEAAGKLLAEEKLEVVDFSSQVDLSKEPGHYVIFWEISGEASQEL

SEQ ID NO: 2018 - protein, 255 aa, Arabidopsis thaliana
MEAGGAYNPRTVEEVFRDFKGRRAGMIKALTTDVQEFFRLCDPEKENLCLYGHPNEHWEVNLPAEEVPPELPEPVLGINFARDGMAEKDWLSLVAVHSDAWLLAVAFFFGARFGFDKADRKRLFNMVNDLPTIFEVVAGTAKKQGKDKSSVSNNSSNRSKSSSKRGSESRAKFSKPEPKDDEEEEEEGVEEEDEDEQGETQCGACGESYAADEFWICCDLCEMWFHGKCVKITPARAEHIKQYKCPSCSNKRARS

SEQ ID NO: 2019 - protein, 475 aa, Ixonanthes icosandra
SALEKKNLGRIAQIIGPVLDVAFPPGKMPNIYNALVVKGRDTIGQQINVTCEVQQLLGNNRVRAVAMSATDGLMRGMEVIDTGAPLSVPVGGATLGRIFNVLGEPVDDLGPVDTRATSPIHRSAPAFIQLDTKLSIFETGIKVVDLLAPYRRGGKIGLFGGAGVGKTVLIMELINNIAKAHGGVSVFGGVGERTREGNDLYMEMKESGVINEENIAESKVALVYGQMNEPPGARMRVGLTALTMAEYFRDVNEQDVLLFIDNIFRFVQAGSEVSALLGRMPSAVGYQPTLSTEMGSLQERITSTKEGSITSIQAVYVPADDLTDPAPATTFAHLDATTVLSRGLAAKGIYPAVDPLDSTSTMLQPQIVGEEHYETAQRVKQTLQRYKELQDIIAILGLDELSEEDRLTVARARKIERFLSQPFFVAEVFTGSPGKYVGLAETIRGFKLILSGELDSLPEQAFYLVGNIDEATAKA

SEQ ID NO: 2020 - protein, 702 aa, Lotus japonicus
MARKLRFFKEQMLKAGVSPKLSTTQVDVNIDNLEVKLSEIESELTEMNANGEKLQRSYNELVEYKLVLQKAGEFFHSAQSGAIEQQREYESRLLSGESMETPLLQDQELSGDSSKQIKLGFLAGLVPREKSMTFERILFRATRGNVFLRQTAVEDPVTDPVSGEKTEKNVFVVFYAGEKVKAKILKICDAFSANRYPFAEELGKQAQMITEASGKISELKTTIDTGLQHRVNLLDTIGVQFEQWNLLIQDALQRAAVDSNSQVSAIFQVLHTKEMPPTYFRTNKFTSSYQGIIDSYGVAKYQEANPTVYTVVTFPFLFAVMFGDWGHGICLLLAALYFIIRERKLSSQKLDDITEMTFGGRYVILLMSLFSIYTGLIYNEFFSVPFELFGPSAYECRDLACSEATTIGLIKARRTYPFGVDPVWHGTRSELPFLNSLKMKMSILLGVAQMNLGIIMSFFNAIFFRNSVNICLFGYLSLLIIVKWCTGSQADLYHVMIYMFLSPTDDLGENELFAGQKNLQLVLLLLAVVAVPWMLLPKPFILKKQHEARHGAESYAPLPSTEESLQVESNHDSHGHEEFEFSEIFVHQLIHTIEFVLGAVSNTASYLRLWALSLAHSELSSVFYEKVLLLAWGYNNVIILIVGILVFIFATVGVLLVMETLSAFLHALRLHWVEFQNKFYEGDGYKFFPFSFSLLDEEDEVL

SEQ ID NO: 2021 - protein, 496 aa, Mayaca aubletii
MRTNPTSSSAAVSTLDEKNLGRIAQIIGPVLDVIFPPGRMPNIYNALVVKGRDTDGRQINVTCEVQQLLGNNRVRAVAMSATDGLMRGMEVIDTGAALSVPVGGTTLGRIFNVLGEPIDNLGPVDTSTTSPIHRSAPAFIQLDTKLSIFETGIKVVDLLAPYRRGGKIGLFGGAGVGKTVLIMELINNIAKAHGGVSVFGGVGERTREGNDLYMEMKESGVINENNLAESKVALVYGQMNEPPGARMRVGLTALTMAEYFRDVNGQDVLLFIDNIFRFVQAGSEVSALLGRMPSAVGYQPTLSTEMGSLQERITSTKEGSITSIQAVYVPADDLTDPAPATTFAHLDATTVLSRGLAAKGIYPAVDPLDSTSTMLQPRIVGEEHYEIAQRVKQTLQRYKELQDIIAILGLDELSEEDRLTVARARKIERFLSQPFFVAEVFTGSPGKYVGLAETIRGFQLILSGELDSLPEQAFYLVGNIEEATAKAMNLEGESKL

SEQ ID NO: 2022 - protein, 467 aa, Enterococcus faecalis V583
MNELNKTPKEIVKELDQYIVGQQAAKKSVAVALRNRYRRLQLEENMQQDITPKNLLMIGPTGVGKTEIARRLAKIVNAPFVKVEATKFTEVGYVGRDVESMVRDLVENAIQIVEKQQYSRVYAQALKKANQRLVKVLVPGIKKEQKQAGGNQFEQMMNMFNMAQQQQEAQEEVTEDIRTNRRTILEQLEKGLLDNREVTIEIEEPKKTMPAMNNGLEQMGIDLNETLGALSPKKKIERTVTVKEAQELLVKEESAKIVNDADIHSEAIRLAESSGIIFIDEIDKITSKSQQNSGEVSREGVQRDILPIVEGSQVNTKYGPLQTDHILFIASGAFHLSKPSDLIPELQGRFPIRVELDDLTADDFVSILTEPNNALIKQYVALIGTENVSVIFTKEAIERLAHIAYDVNRDTDNIGARRLHTILERLLEDLLYEAPDMQMGEITITEAYVNEKLNDIVQNEDLSRYIL

SEQ ID NO: 2023 - protein, 229 aa, Haemophilus somnus 2336
MDNGADALELGFPFSDPLLDGSVIQAANHRALNAGCSTKESFQLIAKVRSKYPDIPISLLLCANLIYAQTLDGFYQRCAEVGVDAVLVADIPLLASEPYIQSAQKYDIQPVFICPPNADETTLKAVAEKSKGYIYLVSRAGVTSAENQQSAKNLANLIKGLKKYGSAPILQGFGIAQPQQVKDVLKSGVAGAISGSAIVQIIEQNLTDREKCLSELAEFVQKMKQATLL

SEQ ID NO: 2024 - protein, 486 aa, Mycobacterium tuberculosis H37Rv
MTTTAEKTDRPGKPGSSDTSGRVVRVTGPVVDVEFPRGSIPELFNALHAEITFESLAKTLTLEVAQHLGDNLVRTISLQPTDGLVRGVEVIDTGRSISVPVGEGVKGHVFNALGDCLDEPGYGEKFEHWSIHRKPPAFEELEPRTEMLETGLKVVDLLTPYVRGGKIALFGGAGVGKTVLIQEMINRIARNFGGTSVFAGVGERTREGNDLWVELAEANVLKDTALVFGQMDEPPGTRMRVALSALTMAEWFRDEQGQDVLLFIDNIFRFTQAGSEVSTLLGRMPSAVGYQPTLADEMGELQERITSTRGRSITSMQAVYVPADDYTDPAPATTFAHLDATTELSRAVFSKGIFPAVDPLASSSTILDPSVVGDEHYRVAQEVIRILQRYKDLQDIIAILGIDELSEEDKQLVNRARRIERFLSQNMMAAEQFTGQPGSTVPVKETIEAFDRLCKGDFDHVPEQAFFLIGGLDDLAKKAESLGAKL

SEQ ID NO: 2025 - protein, 490 aa, Symphionema montanum
APGVSALEEKNLGRIAQIIGPVLDVAFPPGKMPNIYNALVVKGRDTVGQQINVTCEVQQLLGNNRVRAVAMSATDGLMRGMEVIDTGAPLSVPVGGATLGRIFNVLGEPVDNLGPVDTRTTSPIHRSAPAFIQLDTKLSIFETGIKVVDLLAPYRRGGKIGLFGGAGVGKTVLIMELINNIAKAHGGVSVFGGVGERTREGNDLYMEMKESGVINEQNIAESKVALVYGQMNEPPGARMRVGLTALTMAEYFRDVNEQDVLLFIDNIFRFVQAGSEVSALLGRMPSAVGYQPTLSTEMGSLQERITSTKEGSITSIQAVYVPADDLTDPAPATTFAHLDATTVLSRGLAAKGIYPAVDPLDSTSTMLQPRIVGEEHYETAQRVKQTLQRYKELQDIIAILGLDELSEEDRLTVARARKIERFLSQPFFVAEVFTGSPGKYVGLAETIRGFQLILSGELDGLPEQAFYLVGNIDEATAKAMNLEVESNLKK

SEQ ID NO: 2026 - protein, 1022 aa, Saccharomyces cerevisiae
  unsure (1)..(1022): unsure at all Xaa locations
GAIYSVSGPVVIAENMIGCAMYELVKVGHXNLVGEVIRIDGDKATIQVYEETAGLTVGDPVLRTGKPLSVELGPGLMETIYDGIQRPLKAIKEESQSIYIPRGIDTPALDRTIKWQFTPGKFQVGDHISGGDIYGSVFENSLISSHKILLPPRSRGTITWIAPAGEYTLDEKILEVEFDGKKSDFTLYHTWPVRVPRPVTEKLSADYPLLTGQRVLDALFPCVQGGTTCIPGAFGCGKTVISQSLSKYSNSDAIIYVGCFAKGTNVLMADGSIECIENIEVGNKVMGKDGRPREVIKLPRGRETMYSVVQKSQHRAHKSDSSREVPELLKFTCNATHELVVRTPRSVRRLSRTIKGVEYFEVITFEMGQKKAPDGRIVELVKEVSKSYPISEGPERANELVESYRKASNKAYFEWTIEARDLSLLGSHVRKATYQTYAPILYENDHFFDYMQKSKFHLTIEGPKVLAYLLGLWIGDGLSDRATFSVDSRDTSLMERVTEYAEKLNLCAEYKDRKEPQVAKTVNLYSKVVRGNGIRNNLNTENPLWDAIVGLGFLKDGVKNIPSFLSTDNIGTRETFLAGLIDSDGYVTDEHGIKATIKTIHTSVRDGLVSLARSLGLVVSVNAEPAKVDMNGTKHKISYAIYMSGGDVLLNVLSKCAGSKKFRPAPAAAFARECRGFYFELQELKEDDYYGITLSDDSDHQFLLANQVVVHNCGERGNEMAEVLMEFPELYTEMSGTKEPIMKRTTLVANTSNMPVAAREASIYTGITLAEYFRDQGKNVSMIADSSSRWAEALREISGRLGEMPADQGFPAYLGAKLASFYERAGKAVALGSPDRTGSVSIVAAVSPAGGDFSDPVTTATLGITQVFWGLDKKLAQRKHFPSINTSVSYSKYTNVLNKFYDSNYPEFPVLRDRMKEILSNAEELEQVVQLVGKSALSDSDKITLDVATLIKEDFLQQNGYSTYDAFCPIWKTFDMMRAFISYHDEAQKAVANGANWSKLADSTGDVKHAVSSSKFFEPSRG

SEQ ID NO: 2027 - protein, 487 aa, Soldanella montana
  unsure (1)..(487): unsure at all Xaa locations
MRINPTTSGPGASVLEKKNLGRIIQIIGPVLDVSFPPGKMPNIYNALVVKGRDTSGQPINVTCEVXQLLGNNRVRAVAMSATDGLTRGMEVIDTGAALSVPVGGATLGRIFNVLGEPVDNLGPVDTCTTSPIHRSAPAFIQLDTKLSIFETGIKVVDLLAPYRRGGKIGLFGGAGVGKTVLIMELINNIAKAHGGVSVFGGVGERTREGNDLXMEMKESGVINEKNIAESKVALVYGQMNEPPGARMRVGLTALTMAEYFRDVNEQDVLLFIDNIFRFVQAGSEVSALLGRMPSAVGYQPTLSTEMGSLQERITSTKEGSITSIQAVYVPADDLTDPAPATTFAHLDATTVLSRGLASKGIYPAVDPLDSTSTMLQPRIVGEEHYETAQRVKETLQRYKELQDIIAILGLDELSEEDRLTVARARKIERFLSQPFFVAEVFTGSPGKYVGLAETIRGFQLILSGELDGLPEQAFYLVGNIDEATEKA

SEQ ID NO: 2028 - protein, 623 aa, Lycopersicon esculentum
MPSIVGGPMTTFEDSEKESEYGYLRKVSGPVVVADGMGGAAMYELVRVGHDNLIGEIIRLEGDSATIQVYEETAGLMVNDPVLRTHKPLSVELGPGILGNIFDGIQRPLKTIAKRSGDVYIPRGVSVPALDKDILWEFQPKKIGEGDLLTGGDLYATVFENSLMEHRVALPPDAMGKITYIAPAGQYSLNDTVLELEFQGVKKQVTMLQTWPVRSPRPVASKLAADTPLLTGQRVLDALFPSVLGGTCAIPGAFGCGKTVISQALSKYSNSDTVVYVGCGERGNEMAEVLMDFPQLTMTLPDGREESVMKRTTLVANTSNMPVAAREASIYTGITIAEYFRDMGYNVSMMADSTSRWAEALREISGRLAEMPADSGYPAYLAARLASFYERAGKVKCLGGPERTGSVTIVGAVSPPGGDFSDPVTSATLGIVQVFWGLDKKLAQRKHFPSVNWLISYSKYSGALESFYEKFDPDFINIRTKAREVLQREDDLNEIVQLVGKDALAETDKITLETAKLLREDYLAQNAFTPYDKFCPFYKSVWMLRNIIHFYNLANQAVERGAGMDGQKITYTLIKHRLGDLFYRLVSQKFEDPAEGEDVLVGKFQKLHDDLVAGFRNLEDETR

SEQ ID NO: 2029 - protein, 501 aa, Streptococcus pneumoniae TIGR4
MNKRVKIVATLGPAVEIRGGKKFGEDGYWGEKLDVEASAKNIAKLIEAGANTFRFNFSHGDHQEQGERMATVKLAEKIAGKKVGFLLDTKGPEIRTELFEGEAKEYSYKTGEKIRVATKQGIKSTREVIALNVAGALDIYDDVEVGRQVLVDDGKLGLRVVAKDDATREFEVEVENDGIIAKQKGVNIPNTKIPFPALAERDNDDIRFGLEQGINFIAISFVRTAKDVNEVRAICEETGNGHVQLFAKIENQQGIDNLDEIIEAADGIMIARGDMGIEVPFEMVPVYQKMIIKKVNAAGKVVITATNMLETMTEKPRATRSEVSDVFNAVIDGTDATMLSGESANGKYPLESVTTMATIDKNAQALLNEYGRLDSDSFERNSKTEVMASAVKDATSSMDIKLVVTLTKTGHTARLISKYRPNADILALTFDELTERGLMLNWGVIPMLTDAPSSTDDMFEIAERKAVEAGLVESGDDIVIVAGVPVGEAVRTNTMRIRTVR

SEQ ID NO: 2030 - protein, 523 aa, Arabidopsis thaliana
MGGKNKIEILFQLQSALSRRRISSLVDFRRVFPPETPNHKNNITLSRFHFLGTHFLHSLGAPDKFPNRFNDDKDKQSALDVHNIIKHHRGSSPEKIKRILDKCGIDLTEELVLEVVNRNRSDWKPAYILSQLVVKQSVHLSSSMLYNEILDVLGKMRRFEEFHQVFDEMSKRDGFVNEKTYEVLLNRYAAAHKVDEAVGVFERRKEFGIDDDLVAFHGLLMWLCRYKHVEFAETLFCSRRREFGCDIKAMNMILNGWCVLGNVHEAKRFWKDIIASKCRPDVVSYGTMINALTKKGKLGKAMELYRAMWDTRRNPDVKICNNVIDALCFKKRIPEALEVFREISEKGPDPNVVTYNSLLKHLCKIRRTEKVWELVEEMELKGGSCSPNDVTFSYLLKYSQRSKDVDIVLERMAKNKCEMTSDLYNLMFRLYVQWDKEEKVREIWSEMERSGLGPDQRTYTIRIHGLHTKGKIGEALSYFQEMMSKGMVPEPRTEMLLNQNKTKPRVEDKMLRSNLTSEESESD

SEQ ID NO: 2031 - protein, 624 aa, Mesembryanthemum crystallinum
MPAVYGDRLTTFEDSEKESEYGYIRKVSGPVVVADGMNGAAMYELVRVGYDNLIGEIIRLEGDSATIQVYEETAGLMVNDPVLRTHKPLSVELGPGILGNIFDGIQRPLKTIAKRSGDVYIPRGVAVPPLDKDALWEFEPKKIGEGDLLTGGDLYAKVYENSLMAHRVALPPDAMGKITYIAPPGQYSIQDTVLELEFQGVKKEFTMLQSWPVRTPSPVASKLAADTPLLTGQRVLDALFPSVLGGTCAIPGAFGCGKTVISQALSKYSNSDAVVYVGCGERGNEMAEVLMDFPQLTMTLPDGREESVMKRTTLVANTSNMPVAAREASIYTGITIAEYFRDMGYNVSMMADSTSRWAEALREISGRLAEMPADSGYPAYLAARLASFYERAGKVKCLGGPERTGSVTIVGAVSPPGGDFSDPVTSATLSIVQVFWGLDKKLAQRKHFPSVNWLISYSKYTSALETFYEKFDPDFINIRTKAREVLQREDDLNEIVQLVGKDALAETDKITLETAKLLREDYLAQNAFTPYDKFCPFVYKSVWMMRNIIHFYNLANKAVERGAGSDGQKITYSLIKLRLGDLFYRLVSQKFEDPAEGEDTLVAKFQKLYEDLSAAFRNLDDETR

SEQ ID NO: 2032 - protein, 476 aa, Sloanea berteriana
  unsure (1)..(476): unsure at all Xaa locations
XLXKKXXXXIXQIIGPVLDVAFPPGKMPNIYNALVVKGRDTVGQQINVTCEVQQLLGNNRVRAVAMSATDGLMRGMEVIDTRAPLSVPVGGATLGQIFNVLGEPIDNLGPVDTRTTSPIHRSAPAFIQLDTKLSIFETGIKVVDLLAPYRRGGKIGLFGGAGVGKTVLIMELINNIAKAHGGVSVFGGVGERTREGNDLYMEMKESGVINEENIAESKVALVYGQMNEPPGARMRVGLTALTMAEYFRDVNEQDVLLFIDNIFRFVQAGSEVSALLGRMPSAVGYQPTLSTEMGSLQERITSTKEGSITSIQAVYVPADDLTDPAPATTFAHLDATTVLSRGLAAKGIYPAVDPLDSTSTMLQPRIVGEEHYETAQRVKQTLQRYKELQDIIAILGLDELSEEDRLTVARARKIERFLSQPFFVAEVFTGSPGKYVGLAETIRGFKLILSGELDGLPEQAFYLVGNIDEATAKATN

SEQ ID NO: 2033 - protein, 620 aa, Streptomyces avermitilis MA-4680
MDFGTRGPEAPADLAWLRGVDAYTMGAYPQAEEEFRTAVRMDPGMADGWLGLHALRVDTTTALLRMFRHRDRFGEQRTRHRRTLNSWYWLGWWVQPVLESPRDLLLAHASHWLDGRHVPDLDRALASLPPVDTDPQVRFLHACRAYLVKDWEQLVRHTDPLIDDAMLGIEAGLFGGMARVRLEMFGQAEPLLSAALMRCRSEQPQRKELRYWLARAHEGTGRSAAALPLYRAVHRVDPAFMDTSARLAAISDGDGYDEAVDLAAITLTGIGQDLIDGPDGVDPLFGGEGRELKLSEPEPAPPGALPQEADAVREKTVVPVQPLPAGPTDPELLEEALAELERMVGLEPVKRQVKALSAQLNMARLRAGQGLPVQPPKRHFVFSGPSGTGKTTVARILGRVFYALGLLGGDHLVEAQRADLVGEYLGQTAVKANELIDSAIGGVLFVDEAYALSNSGYGKGDAYGDEALQVLLKRAEDNRDHLVVILAGYPEGMDRLLAANPGLSSRFTTRVDFPSYRPLELTSIGEVLAAENGDVWDEEALDELRSISGHVIDQGWIDELGNGRFLRTLYEKSCAYRDLRLTGYPRTPSRDDLSTLRLPDLMQAYGEVLSGRGPQDPSAL

SEQ ID NO: 2034 - protein, 471 aa, Abatia parviflora
LGHIAQIIGPVLDVAFLPGKMPNIYNALVVKGQDTVGQQINVTCEVQQLLGNNRVRAVAMSATDGLMRGMEVIDTGAPLSVPVGGATLGRIFNVLGEPVDNLGPVDTRTTSPIHRSAPAFIQLDTKLSIFETGIKVVDLLAPYRRGGKIGLFGGAGVGKTVLIMELINNIAKAHGGVSVFGGVGERTREGNDLYMEMKESGVINEENIAESKVALVYGQMNEPPGARMRVGLTALTMAEYFRDVNEQDVLLFIDNIFRFVQAGSEVSALLGRMPSAVGYQPTLSTEMGSLQERITSTKEGSITSIQAVYVPADDLTDPAPATTFAHLDATTVLSRGLAAKGIYPAVDPLDSTSTMLQPQIVGEEHYETAQRVKQTLQRYKELQDIIAILGLDELSEEDRLTVARARKIERFLSQPFFVAEVFTGSPGKYVGLAETIRGFKLILSGELDSLPEQAFYLVGNIDEATAKATNL

SEQ ID NO: 2035 - protein, 466 aa, Arabidopsis thaliana
MDVPRPAFKCFDDDGRLKRSGTVWTASAHIITAVIGSGVLSLAWAIGQLGWIAGPTVMLLFSFVTYYSSTLLSDCYRTGDPVSGKRNYTYMDAVRSILGGFRFKICGLIQYLNLFGITVGYTIAASISMMAIKRSNCFHESGGKNPCHMSSNPYMIMFGVTEILLSQIKDFDQIWWLSIVAAIMSFTYSAIGLALGIIQVAANGVVKGSLTGISIGAVTQTQKIWRTFQALGDIAFAYSYSVVLIEIQDTVRSPPAESKTMKIATRISIAVTTTFYMLCGCMGYAAFGDKAPGNLLTGFGFYNPFWLLDVANAAIVIHLVGAYQVFAQPIFAFIEKQLAARFPDSDLVTKEYEIRIPGFRSPYKVNVFRAVYRSGFVVLTTVISMLMPFFNDVVGILGALGFWPLTVYFPVEMYIRQRKVERWSMKWVCLQMLSCGCLMITLVAGVGSIAGVMLDLKVYKPFKTTY

SEQ ID NO: 2036 - protein, 584 aa, Bacillus halodurans
MRKTKIVCTIGPASESVEKLEQLMEAGMNVARLNFSHGDFEEHGARIKNIREAAKRIGKTVAILLDTKGPEIRTQTLEGGVAELKAGQELVISMKEVVGTSERISVTYPGLVHDVVPGAKILLDDGLIGLEVVEVRDQEILTKVLNSGTLKNKKGVNVPNVSVNLPGITEKDAADIKFGIEQGVDFIAASFVRRAQDVLEIRELLEQHGAEHIKIIPKIENQEGVDNIEEILEVSDGLMVARGDLGVEIPAEEVPLVQKSLIKKCNLVAKPVITATQMLDSMQRNPRPTRAEASDVANAIFDGTDAIMLSGETAAGDYPVEAVQTMSRIAERAEQALNYQEILSKHTKEARTTITSAISQSVGHTAFNLNASAILTATESGHTARVVAKYRPKSPIVAVTSNETVVRQLALVWGVYSILGEEAETTDDMLQVTVETALKSQLVKQGDLVVITAGVPVGETGTTNIMKVHVIGEVVAKGQGIGRDTVNGKVVIAANAEEANAKVEEGSILVTFSTDKDMMPAFEKAAAVITEEGGITSHAAVVGLSLNTPVIVGVQNASALFKDGEEITVDTSRGDIYRGQASVL

SEQ ID NO: 2037 - protein, 256 aa, Clostridium thermocellum ATCC 27405
MNKLERAFSNGKAFIPFITAGDPSLEITEQLVYRMAEAGADLIELGIPFSDPVAEGPVIQEADYRALSAGTTTDKIFDMVGRIRKSCDIPIAFMTYANPIFTYGSEKFLKRCGETGIDALIVPDIPFEEKEELAPFCKEYDVRFISMIAPTSKERIRMIAREAEGFIYCVSSMGVTGVREKIGDDAKEMIKIVKEVRDIPCAVGFGISTPEQAAQMAGFSDGVIVGSAIVKIIAQYGAECIPYVEEYVRKMKNAIK

SEQ ID NO: 2038 - protein, 322 aa, Bacillus subtilis
MLERAVTYKNNGQINIILNGQKQVLTNAEAEAEYQAALQKNEAKHGILKEIEKEMSALVGMEEMKRNIKEIYAWIFVNQKRAEQGLKVGKQALHMMFKGNPGTGKTTVARLIGKLFFEMNVLSKGHLIEAERADLVGEYIGHTAQKTRDLIKKSLGGILFIDEAYSLARGGEKDFGKEAIDTLVKHMEDKQHEFILILAGYSREMDHFLSLNPGLQSRFPISIDFPDYSVTQLMEIAKRMIDEREYQLSQEAEWKLKDYLMTVKSTTSPIKFSNGRFVRNVIEKSIRAQAMRLLMGDQYLKSDLMTIKSQDLSIKEEASGSA

SEQ ID NO: 2039 - protein, 498 aa, Schisandra sphenanthera
  unsure (1)..(498): unsure at all Xaa locations
MRINPTTSXPGVSTLEEKTLGRITQIIGPVLDVAFPPGKMPNINNSLXVKGRDTVGQQINVTCXVQQLLGNNRVRAVAMSATDGLMRGMEVIDTGAPLSVPVGGSTLGRIFNVLGEPVDNLGPVDTRTTSPIHRSAPAFIQLDTKLSIFETGIKVVDLLAPYRRGGKIGLFGGAGVGKTVLIMELINNIAKAHGGVSVFGGVGERTREGNDLYMEMKESGVINEQNIAESKVALVYGQMNEPPGARMRVGLTALTMAEYFRDVNEQDVLLFIDNISRFVQAGSEVSALLGRMPSAVGYQPTLSTEMGSLQERITSTKEGSITSIQAVYVPADDLTDPAPATTFAHLDATTVLSRGLAAKGIYPAVDPLDSTSTMLQPRIVGEEHYETAQRVKQTSQRYKELQDIIAILGLDELSEEDRLTVARARKIERFLSQPFFVAEVFTGSPGKYVGLAETIRGFQLILSGELDGLPEQAFYLVGNIDEATAKAMNLEVESKLKK

SEQ ID NO: 2040 - protein, 318 aa, Glycine max
MADQSEHSKTASPPEDQDRPVRVYADGIYDLFHFGHARSLEQAKKSFPNTYLLVGCCNDEVTHKYKGKTVMTEAERYESLRHCKWVDEVIPDAPWVINQEFLDKHYIDYVAHDSLPYADASGAANDVYEFVKSVGRFKETKRTEGISTSDVIMRIVKDYNQYVLRNLDRGYSRNELGVSYVKEKRLRVNRRLKTLQEKVKEHQEKVGEKIQIVAKTAGMHRNEWVENADRWVAGFLEMFEEGCHKMGTAIRDRIQERLRGQQSRDGTLRLQNGKDDKDDDDEEYYYDEEDDSDEEYFEEYYDDDELNPQNNGKDEKKE

SEQ ID NO: 2041 - protein, 311 aa, Glycine max
MALALKSSCLLQLKKPEAGFNVCFSSKKAIISVKRYTPVAAIRIMDAVGLSATFTRLKKEGKVAFIPYVTAGDPDLSTTAEALKLLDSCGSDIIELGIPYSDPLADGPVIQAAATRSLAKGTNFNVIIDMLKEVVPQLSCPIALFTYYNPILKRGTEKFMSTIRDTGVHGLVVPDVPLEETETLRTEAKKHGIELVLLTTPTTPPDRMKAIVDVAEGFVYLVSSVGVTGARASVSGSVQSLLQEIKEATTKPVAVGFGISKPEHVKQVAGWGADGVIVGSAIVKVLGEAKSPQEGLKELEVLTRSLKAALP

SEQ ID NO: 2042 - protein, 279 aa, Brucella suis 1330
MTTRIDTKFAELKAEGRPALVTYFMGGDPDLETALKVMKALPKAGADVIELGMPFSDPMADGPAIQAAGLRALNAGQTLAKTLYMAAEFRKEDDTTPIVMMGYYNPIYVYGVERFLTDAKASGVDGLIVVDLPSEMDAELCIPAMKAGINFIRLTTPTTDDKRLPKVLHNSSGFVYYVSMNGITGAAIADTAKVGEAVRHIKKSTDLPICVGFGVKTPEQAAAIATHADGVVVGTAIVNAIAGELDEKGKVKGDPVAAATRLVHALAESVRATRLEAAQ

SEQ ID NO: 2043 - protein, 496 aa, Marantochloa atropurpurea
  unsure (1)..(496): unsure at all Xaa locations
MRXNPTTSSSAXSTLEEQNLGRIAQIIGPVLDVVFPPGKMPNIYNALVVKGRDTVGQQINVTCEVQQLLGNNRVRAVAMSATDGLMRGMEVIDTGAPLSVPVGGATLGRIFNVLGEPVDNLGPVDTSTTSPIHRPAPAFIQLDTKLSIFETGIKVVDLLAPYRRGGKIGLFGGAGVGKTVLIMELINNIAKAHGGVSVFGGVGERTREGNDLYMEMKESGVINEKNIAESKVALVYGQMNEPPGARMRVGLTALTMAEYFRDVNEQDVLLFIDNIFRFVQAGSEVSALLGRMPSAVGYQPTLSTEMGSLQERITSTKEGSITSIQAVYVPADDLTDPAPATTFAHLDATTVLSRGLAAKGIYPAVDPLDSTSTMLQPRIVGEEHYETAQRVKQTSQRYKELQDIIAILGLDELSEEDRLTVARARKIERFLSQPFFVAEVFTGSPGKYVGLAETIRGFQLILSGELDSLPEQAFYLVGNIDEATAKAMNLEGESKL

SEQ ID NO: 2044 - protein, 426 aa, Oryza sativa (japonica cultivar-group)
MNGGIGDALMQPQHVQVMSSSLPMVASTFVAEPAAAANKPRAAGLPPTPPQVFAAQRAAAAAGGDVCMEESAQGGGGGLPPRKAHRRSSSDVPFGYLAGQHQLLPPKVEAGWGHLGAGAGGAAAADDLFNAYLNLEGLDGLNSSDDRHDEGDSRGSSIKTNGADSSENESEECADDTRGGIRLWSADGGERREGVKRNAAGEPATAPLARHARSLSMDSLIGKFNFTAGTAAAAGNGVALGPNRFSLEFGSGEFTPSEMKKIMADEKLAEMALADPKRVKRVLANRQSAARSKERKMRYIAELEQKVQILQSEATNLSAQLTMMQRDSAGLATQNNELKFRLHAMEQQAQLRDALNEALTTEVQRLKLATAELGDSCSSSSLAQQIQLNAQNQMFQLQQQQATQIPFYQLQQSQQNGAAKNNESKE

SEQ ID NO: 2045 - protein, 490 aa, Musgravea heterophylla
GPGVSALEEKNLGRIAQIIGPVLDVAFPPGKMPNIYNALVVKGRDTVGQQINVTCEVQQLLGNNRVRAVAMSATDGLMRGMEVIDTGAPLSVPVGGATLGRIFNVLGEPVDNLGPVDTRTTSPIHRSAPAFIQLDTKLSIFETGIKVVDLLAPYPRGGKIGLFGGAGVGKTVLIMELINNIAKAHGGVSVFGGVGERTREGNDLYMEMKESGVINEQNIAESKVALVYGQMNEPPGARMRVGLTALTMAEYFRDVNEQDVLLFIDNIFRFVQAGSEVSALLGRMPSAVGYQPTLSTEMGSLQERITSTKEGSITSIQAVYVPADDLTDPAPATTFAHLDATTVLSRGLAAKGIYPAVDPLDSTSTMLQPRIVGEEHYETAQRVKQTLQRYKELQDIIAILGLDELSEEDRLTVARARKIERFLSQPFFVAEVFTGSPGKYVGLAETIRGFQLILSGELDGLPEQAFYLVGNIDEATAKAMNLEVESNLKK

SEQ ID NO: 2046 - protein, 376 aa, Solanum tuberosum
HIITAVIGSGVLSLAWATAQLGWVAGPTVLLLFFFVTYYTSALLSDCYRTGDPVTGKRNYTYMDAVRANLGGFQVKICGVIQYANLFGVAIGYTIAASISMVAVNRSNCFHKQGHRAACNVSSTPYMIIFGVMEIIFSQIPDFDQISWLSIVAAVMSFTYSTIGLGLGVAQVAETGKIEGSLTGISIGTEVTEMQKIWRSFQALGAIAFAYSYSLILIEIQDTLKSPPAEAKTMKRATLISVAVTTVFYMLCGCFGYAAFGDQSPGNLLTGFGFYNPYWLLDIANVAIVVHLVGAYQVYCQPLFAFVEKTATEWYPDSKIITKEIDVPIPGFKPFKLNLFRLVWRTIFVIITTVISMLMPFFNDVVGILGAFGFWP

SEQ ID NO: 2047 - protein, 490 aa, Neisseria meningitidis MC58
MNQTSRDLTRISHNTKIVATLGPGSNNVELLEDMIRVGGLNVVRFNFSHGTPEFHQENALIVREAAKRAGQEIAIIADLQGPKIRVGKIAGGGIELNKGETLVLDAALEGEGTREAVGLDYRDLPDDVAAGDVLWLDDGLLTLTVESVEGSRIITRVENSHVLKSNKGINKRGGGLSAGALTEKDFRDLKTAIAIGCDYLAISFVKSAEDLHIARAKVEEEMKGSTAVRPGLVSKIERVEAIENLDEIILAGDGIMVARGDLAVEVGHAAVPALQKRMIRRARELRRFSITATQMMESMITNPVPTRAEVSDVANAVLDGTDAVMCSAETAVGAYPFETVSQMAIICAAAEKEQDSLNGVAEQVEYPEAVSTNLAVAGGAVSVARAVHAKAIVALTESGSTAFEISRHNITLPIFALTPSVSAQRRMAMYRGVRPLILATSTDHDTALNEVETMLVEHNILHSGDQYIITSGSQMRESGSTNTLEVLRVK

SEQ ID NO: 2048 - protein, 474 aa, Severinia buxifolia
  unsure (1)..(474): unsure at all Xaa locations
VSALANKNLGHIAQIIGPVLDVAFPPGKMPNIYNALVVKGRDTVDQPINVACEVQQLLGNNRVRAVAMSATDGLTRGMEVIDTGAPLSVPVGGVTLGRIFNVLGEPVDNLGPVDTRTTSPIHKSAPAFIQLDTRLSIFETGIKVVDLLAPYRRGGKIGLFGGAGVGKTVLIMELINNIAKAHGGVSVFGGVGERTREGNDLYMEMKESGVINDQNLSESKVALVYGQMNEPPGARMRVGLTALTMAEYFRDVNEQDVLLFIDNIFRFVQAGSEVSALLGRMPSAVGYQPTLSTEMGSLQERITSTKEGSITSIQAVYVPADDLTDPAPATTFAHLDATTVLSRGLAAKGIYPAVDPLDSTSTMLQPRIVGEEHYETAQRVKQTLQRYKELQDIIAILGLDELSEEDRLTVARARKIERFLSQPFFVAEVFTGSPGKYVGLAETIRGFKLILSGELDGLPEQAFYLVGNIDEXTA

SEQ ID NO: 2049 - protein, 95 aa, Triticum aestivum
GFIYLVSVNGVTGPRENVNLRVKSLIQEIKKVTDKPVAVGFGISKPEHVKQIAGWGADGVIIGSAMVRQLGEAASPREGLKRLEAYARSMKNALP

SEQ ID NO: 2050 - protein, 624 aa, Mycobacterium tuberculosis CDC1551
MTAAAMSRMVDTMGDLLTARRHFDRAMTIKNGQGCVAALPEFVAATEADPSMADAWLGRIACGDRDLASLKQLNAHSEWLHRETTRIGRTLAAEVQLGPSIGITVTDASQVGLALSSALTIAGEYAKADALLANRELLDSWRNYQWHQLARAFLMYVTQRWPDVLSTAAEDLPPQAIVMPAVTASICALAAHAAAHLGQGRVALDWLDRVDVIGHSRSSGRFGADVLTAAIGPADIPLLVADLAYVRGMVYRQLHEEDKAQIWLSKATINGVLTDAAKEALADPNLRLIVTDERTIASRSDRWDASTAKSRDQLDDDNAAQRRGELLAEGRELLAKQVGLAAVKQAVSALEDQLEVRMMRLEHGLPVEGQTNHMLLVGPPGTGKTTTAEALGKIYAGMGIVRHPEIREVRRSDFCGHYIGESGPKTNELIEKSLGRIIFMDEFYSLIERHQDGTPDMIGMEAVNQLLVQLETHRFDFCFIGAGYEDQVDEFLTVNPGLAGRFNRKLRFESYSPVEIVEIGHRYATPRASQLDDAAREVFLDAVTTIRNYTTPSGQHGIDAMQNGRFARNVIERAEGFRDTRVVAQKRAGQPVSVQDLQIITATDIDAAIRSVCSDNRDMAAIVW

SEQ ID NO: 2051 - protein, 481 aa, Pterospermum celebicum
  unsure (1)..(481): unsure at all Xaa locations
TLEKQXLGRISQIIGPVLDVAFPPGKMPNIYNALVVKGRDTVGQQINVTCEVQQLLGNNRVRAVAMSATDGLMRGMEVIDTGAPLSVPVGGATLGRIFNVLGEPVDNLGPVDTRTTSPIHKPAPAFIQLDTKLSIFETGIKVVDLLAPYRRGGKIGLFGGAGVGKTVLIMELINNIAKAHGGVSVFGGVGERTREGNDLYMEMKESGVINEQNLAESKVALVYGQMNEPPGARMRVGLTALTMAEYFRDVNEQDVLLFIDNIFRFVQAGSEVSALLGRMPSAVGYQPTLSTEMGSLQERITSTKEGSITSIQAVYVPADDLTDPAPATTFAHLDATTVLSRGLAAKGIYPAVDPLDSTSTMLQPRIVGEEHYETAQRVKQTLQRYKELQDIIAILGLDELSEEDRLTVARARKIERFLSQPFFVAEVFTGSPGKYVGLAETIRGFKLILSGELDGLPEQAFYLVGNIDEATAKATNLEMES

SEQ ID NO: 2052 - protein, 425 aa, Ralstonia metallidurans
MADKKGSSSEKLLYCSFCGKSQHEVKKLIAGPSVFICDECIDLCNEIIRDEASATDKDATAATRSDLPTPHEIRESLDQYVIGQDQAKKILAVAVYNHYKRLKHLGKKDDVELSKSNILLIGPTGSGKTLLAQTLARLLNVPFVIADATTLTEAGYVGEDVENIIQKLLQNCNYEVEKAQRGIVYIDEIDKISRKSDNPSITRDVSGEGVQQALLKLIEGTMASVPPQGGRKHPNQDFLQVDTTNILFICGGAFDGLEKVIMQRSDKTGIGFAAQVQSKEEREVSEVLPQTEPEDLIKFGLIPELIGRLPVVATLAKLDEAALMQILIEPKNALVKQYQKLLAMEGVELEIRPAALSAIARKAIRRKTGARGLRSILEQSLMDVMYDLPNYKGVQKVVIDENTITGDAAPLLVYEEQQPKVAGSN

SEQ ID NO: 2053 - protein, 475 aa, Guillardia theta
MTNTATNIGYITQIIGPVVDVEFTTGKLPQIYNAIIIGSGENAVTCEVQQLLGNNKVRAVSMTSTDGLKRGMEVTDTQAPISVPVGKATLGRIFNVLGQPVDNMGDVALDQTLPIHRGSPAFTQLETKPSIFETGIKVVDLLAPYRRGGKIGLFGGAGVGKTVLIMELINNIAKAHGGVSVFGGVGERTREGNDLYMEMKESKVINESNLGESKVALVYGQMNEPPGARMRVGLTALTMAEYFRDVNKQDVLLFIDNIFRFVQAGSEVSALLGRMPSAVGYQPTLATEMGSLQERITSTTEGSITSIQAVYVPADDLTDPAPATTFSHLDATTVLSRNLAAKGIYPAVDPLDSTSTMLQINIVGQEHYSCAQNVKETLQRYKELQDIIAILGLDELSEEDRQIVARARKIERFLSQPFFVAEVFTGSPGKYVSLADTMKGFNMILNGELDELPEQSFYLVGNIDEAIEKAKSLKG

SEQ ID NO: 2054 - protein, 490 aa, Dipteropeltis poranoides
  unsure (1)..(490): unsure at all Xaa locations
MRINPTTSSXEVFAVEKKNIGRIVQIIGPVLDVAFPPGKMPNIYNALVVQGRDNEQTNVTCEVQQLLGNNRVRAVAMSDTDGLMRGMEVIDTGAPISVPVGGATLGRIFNVLGEPVDNLGPVDTKTTSPIHRSAPAFIQLDTKLSIFETGIKVVDLLAPYRRGGKIGLFGGAGVGKTVLIMELINNIAKAHGGVSVFGGVGERTREGNDLYMEMKESGVIDEENIAESKVALVYGQMNEPPGARMRVGLTALTMAEYFRDVNEQDVLLFIDNIFRFVQAGSEVSALLGRMPSAVGYQPTLSTEMGSLQERITSTKEGSITSIQAVYVPADDLTDPAPATTFAHLDATTVLSRGLAAKGIYPAVDPLDSTSTMLQPRIVGEEHYETAQRVKQTLQRYKELQDIIAILGLDELSEEDRLTVARARKIERFLSQPFFVAEVFTGSPGKYVGLAETIRGFQLILSGELDGLPEQAFYLVGNIDEATAKAMNLKT

SEQ ID NO: 2055 - protein, 497 aa, Pistacia vera
  unsure (1)..(497): unsure at all Xaa locations
XXXXXXXXGPGVSALEKKNLGRIAQIIGPVLDVAFPPGKMPNIYNALVVKGRDTVGQPINVTCEVQQLLGNNRFRAVAMSATDGLTRGMEVIDTGAPLSVPVGGATLGRIFNVLGEPVDNLGPVDTRTTSPIHKSAPAFIQLDTKLSIFETGIKVVDLLAPYRRGGKIGLFGGAGVGKTVLIMELINNIAKAHGGVSVFGGVGERTREGNDLYMEMKESGVINEQNIAESKVALVYGQMNEPPGARMRVGLTALTMAEYFRDVNEQDVLLFIDNIFRFVQAGSEVSALLGRMPSAVGYQPTLSTEMGSLQERITSTKEGSITSIQAVYVPADDLTDPAPATTFAHLDATTVLSRGLAAKGIYPAVDPLDSTSTMLQPRIVGEEHYETAQRVKQTLQRYKELQDIIAILGLDELSEEDRLTVARARKIERFLSQPFFVAEVFTGSPGKYVGLAETIRGFKLILSGELDGLPEQAFYLVGNIDEATAKATNLEMESNLK

SEQ ID NO: 2056 - protein, 138 aa, IPOMOEA LITTORALIS
HAAELTAGFYNVPKRDGYRPIARMLARHHATLNFTCLEMRDSEQPAEAKSAPQELVQQVLSSGWKEYIDVAGENALPRYDATAYNQMLLNVRPNGVNLNGPPKLKMSGLTYLRLSDDLLQTDNFQLFKKFVKKMHADL

SEQ ID NO: 2057 - protein, 129 aa, Castanea sativa
KDIRLTYALFTAPSPVVNDPPLSYRNLFDAILDTLYSALEKAGGGSLVIVISESGWPSAGGTATTLDNERTYITNLVQHVKGGTPKKPGRPIETYIFALFDETFKSPEVEKHWGMFLPNKQPKYNIQSN

SEQ ID NO: 2058 - protein, 551 aa, Borrelia burgdorferi B31
MNEVLFVKTAGRNLKAEVIRIRGNEVDAQVFELTKGISVGDLVEFTDKLLTVELGPGLLTQVYDGLQNPLPELAIQCGFFLERGVYLRPLNKDKKWNFKKTSKVGDIVIAGDFLGFVIEGTVHHQIMIPFYKRDSYKIVEIVSDGDYSIDEQIAVIEDDSGMRHNITMSFHWPVKVPITNYKERLIPSEPMLTQTRIIDTFFPVAKGGTFCIPGPFGAGKTVLQQVTSRNADVDVVIIAACGERAGEVVETLKEFPELMDPKTGKSLMDRTCIICNTSSMPVAAREASVYTAITIGEYYRQMGLDILLLADSTSRWAQAMREMSGRLEEIPGEEAFPAYLESVIASFYERAGIVVLNNGDIGSVTVGGSVSPAGGNFEEPVTQATLKVVGAFHGLTRERSDARKFPAISPLESWSKYKGVIDQKKTEYARSFLVKGNEINQMMKVVGEEGISNDDFLIYLKSELLDSCYLQQNSFDSIDAAVSSERQNYMFDIVYNILKTNFEFSDKLQARDFINELRQNLLDMNLSSFKDHKFNKLEHALGELINFKKVI

SEQ ID NO: 2059 - protein, 302 aa, Glycine max
  unsure (1)..(302): unsure at all Xaa locations
SDHWGISIMAVXAVVFTVYVLVLLLLTSGRDPGIIPRNAHPPEPEGLDSNLDVGAGQTPQLRLPRFKEVEVNGIPVKVXYCDTCMLYRPPRCSHXSICNNCVERFDHHCPWVGQCIGLRNYRFPTRPVFSTTLLCIYVFAFCWVYIVRIMASEETTIWKAMIKTPASIVLIIYTFISMWFVGGLTAFHLYLISTNQTTYENFRYRYDRRANPYNEGVLNNFKEIFCISIPLSKNNFRAMVPREPALPTRSVGGGFMNHNLRKAGEDIEMGRKTVWDMGAGMDDNGAPINDDRVTIKDGELSP

SEQ ID NO: 2060 - protein, 584 aa, Bacillus subtilis
MRKTKIVCTIGPASESIEMLTKLMESGMNVARLNFSHGDFQEHGARIKNIREAAEKLGKNVGILLDTKGPEIRTHTMENGSIELNAGSKLVISMTEVIGTPDKISVTYEGLVHDVNKGSTILLDDGLIGLEVLDVDAVKREIKTKVLNNGTLKNKKGVNVPGRKCQSSGITEKDARDIVFGIEQGVDFIAPSFIRRSTDVLEIRELLEEHNAQDIQIIPKIENQEGVDNIDAILEVSDGLMVARGDLGVEIPAEEVPLVQKELIKKCNALGKPVITATQMLDSMQRNPRPTRAEASDVANAIFDGTDAIMLSGETAAGSYPVEAVQTMHNIASRSEEALNYKEILSKRRDQVGMTITDAIGQSVAHTAINLNAAIVTPTESGHTARMIAKYRPQAPIVAVTVNDSISRKLALVSGVFAESGQNASSTDEMLEDAVQKSLNSGIVKHGDLIVITAGTVGESGTTNLMKVHTVGDIIAKGQGIGRKSAYGPVVVAQNAKEAEQKMTDGAVLVTKSTDRDMITSLEKASALITEEGGLTSHAAVVGLSLGIPVIVGLENATSILTDGQDITVDASRGAVYQGRASVL

SEQ ID NO: 2061 - protein, 720 aa, Oryza sativa; identical to SEQ ID NO: 574

SEQ ID NO: 2062 - protein, 55 aa, Triticum aestivum
RPGRRALGRVASGATCVQRLDGSRDSAIHTRYRISLRSSSMREPRYPLPRVVWIK

SEQ ID NO: 2063 - protein, 483 aa, Mollugo verticillata
SGPGVSTLEKKNLGRIAQIIGPVLDVAFPPGKMPNIYNALVVKGRDTAGQPINVTCEVQQLLGNNRVRAVAMSATDGLTRGMEVIDTGAALSVPVGGATLGRIFNVLGEPVDNLGPVDTGTTSPIHRSAPAFTQLDTKLSIFETGIKVVDLLAPYRRGGKIGLFGGAGVGKTVLIMELINNIAKAHGGVSVFGGVGERTREGNDLYMEMKESGVINEENIAESKVALVYGQMNEPPGARMRVGLTALTMAEYFRDVNEQDVLLFIDNIFRFVQAGSEVSALLGRMPSAVGYQPTLSTEMGSLQERITSTKEGSITSIQAVYVPADDLTDPAPATTFAHLDATTVLSRGLAAKGIYPAVDPLDSTSTMLQPRIVGEEHYETAQRVKQTLQRYKELQDIIAILGLDELSEEDRLTVARARKIERFLSQPFFVAEVFTGSPGKYVGLAETIRGFKLILSGELDSLPEQAFYLVGNIDEATAKGINL

SEQ ID NO: 2064 - protein, 224 aa, Streptococcus pneumoniae
MPKTLTEKLNAIKATGKGIFVPYIMAGDHEKGLDGLGETIHFLEDLGVSAIEVGIPFSDPVADGPVIEEAGLRSLAHGTSTQALVETLKTIKTEIPLVIMTYFNPLFQYGVENFVKDLADTAVKGLIIPDLPHEHANFVEPFLADTDIALIPLVSLTTGIERQKELIEGAEGFVYAVAINGVTGKSGNYRADLDKHLAQLHQVADIPVLTGFGVSSQADLERFN

SEQ ID NO: 2065 - protein, 373 aa, Galphimia gracilis
VDNLGPVDTRTTSPIHRSAPAFIQLDTKLSIFETGIKVVDLLAPYRRGGKIGLFGGAGVGKTVLIMELINNIAKAHGGVSVFGGVGERTREGNDLYMEMKESGVINEENIAESKVALVYGQMNEPPGARMRVGLTALTMAEYFRDVNEQDVLLFIDNIFRFVQAGSEVSALLGRMPSAVGYQPTLSTEMGSLQERITSTKEGSITSIQAVYVPADDLTDPAPATTFAHLDATTVLSRGLAAKGIYPAVDPLDSTSTMLQPQIVGEEHYETAQRVKQTLQRYKELQDIIAILGLDELSEEDRLTVARARKIERFLSQPFFVAEVFTGSPGKYVGLAETIRGFKLILSGELDSLPEQAFYLVGNIDEATAKAVNL

SEQ ID NO: 2066 - protein, 267 aa, Bacillus subtilis subsp. subtilis str. 168
MFKLDLQPSEKLFIPFITAGDPVPEVSIELAKSLQKAGATALELGVAYSDPLADGPVIQRASKRALDQGMNIVKAIELGGEMKKNGVNIPIILFTYYNPVLQLNKEYFFALLRENHIDGLLVPDLPLEESNSLQEECKSHEVTYISLVAPTSESRLKTIIEQAEGFVYCVSSLGVTGVRNEFNSSVYPFIRTVKNLSTVPVAVGFGISNREQVIKMNEISDGVVVGSALVRKIEELKDRLISAETRNQALQEFEDYAMAFSGLYSLK

SEQ ID NO: 2067 - protein, 652 aa, Triticum aestivum
  unsure (1)..(652): unsure at all Xaa locations
MLASLFCAVSSSCQLSSLSCPKRVFETLASPTKTIKNMLTVPSSPSSPANGGSVKVVHMTPVTSAMTTAKWLRGVISLLPEKPSSKLEKFLSSCDTDLTSDVTKRVSIILEAIFPTKPSGHWGGSMGLNCTNAFDIPWAEARKMEASKLYYRVLEAICRAESLNTNVNNLTPLLSNERFHRCLIACSAELVLATHKTVIMMFPAVLESTGLTAFDLSKIIENFVRHEESLPRELKRHLNSLEEQLLESMAWEKGSSLYNSLVVARPSLASEINRLGLLAESMPSLDDIVARQNFHAEDLPATPSKKRAAYSDENGDSRSPKRLCIEPRSTLVDQISQTPPAKQSYTLKAKWRPLQSTFASPTVSNPVGGNEKCAEVGVHIFFSKILKLAAIRIRNLCERLRHVEQTERVYNIFKQILDQQTTLFFNRHIDQLILCSLYGVAKVSQLTLTFKEIVNNYRREQQCIPEVFRSVFVVNTNHNAXLGSRHVDIIVFYNEVFVPAVKPFLVALIPSGGAHPDNKKNPNSQIPGSPKPPPFSNLPDMSPKKVSSSHNVYISPLRQTKKDALLSPSSRSFYACIGESTHAYQSPSEDLAAINNCLNYTSRRINTRINFDMVSDSVVAGSLGQPNGVPASSDPAGSFSFLSRKDNPGPDS

SEQ ID NO: 2068 - protein, 420 aa, Bacillus subtilis
MFKFNEEKGQLKCSFCGKTQDQVRKLVAGPGVYICDECIELCTEIVEEELGTEEEVEFKDVPKPQEIREILNEYVIGQDQAKKSLAVAVYNHYKRINSNSKVDDVELSQSNISLIGPTGSGKTLLAQTLARILNVPFAIADATSLTEAGYVGEDVENILLELIQAADYDVEKTGKGIIYIDEIDKVARKSENPSITRDVSGEGVQQALLKILEGTVASVPPQGGRKHPHQEFIQIDTTNILFICGGAFDGIEQIIKRRLGQKVIGFGADNKAADLEKEDLLSKVLPEDLLRFGLIPEFIGRLPVIASLEKLDEEALVAILTKPKNALVKQFKKMLELDNVELEFEEEALSEIAKKAIERKTGARGLRSIIEGIMLDVMFELPSRDDIEKCVITGATVTHGEPPRLLLKDGTEVSQDKTSA

SEQ ID NO: 2069 - protein, 242 aa, Shigella sonnei
LKERKEGAFVPFVTLGDPGIEQSLKIIDTLIEAGADALELGIPFSDPLADGPTIQNATLRAFAAGVTPAQCFEMLALIRQKHPTIPIGLLMYANLVFNKGIDEFYAQCEKVGVDSVLVADVPIEESAPFRQAALRHNVAPIFICPPNADDDLLRQIASYGRGYTYLLSRAGVTGAENRAALPLHHLVAKLKEYNAAPPLQGFGISTPDYVKAPIDAGAAGAISGSAIVKIIEQHINEPEKML

SEQ ID NO: 2070 - protein, 579 aa, Enterococcus faecium
MAENMSDASIQDMCLVGDLGVIGEIIEMRGDVASIQVYEETSGIGPGEPVRSTGEALSVELGPGIISQMFDGIQRPLDTFMEITQSNFLGRGVQLPALDHEKKWWFEPTVEAGETVSAGDVIGIVEETKVIKHKIMVPNGIKGTIKTIEKGSFTIDETVCVIETENGDKNLTMLQKWPVRRSRPIKEKLNPDAPMITGQRVIDTFFPVTKGGAAAVPGPFGAGKTVVQHQIAKWADVDMVVYVGCGERGNEMTDVLNEFPELIDPNTGESLMERTVLIANTSNMPVAAREASIYTGITIAEYFRDMGYDVAIMADSTSRWAEALREMSGRLEEMPGDEGYPAYLGSRLAEYYERSGRVIALGSEGREGSITAISAVSPSGGDISEPVTQNTLRVVKVFWGLDSSLAQKRHFPSIDWIQSYSLYSTEVGKYMDHILQADWASMVTEGMRILQEEQQLNEIVRLVGIDSLSDNDRLTLEVAKSIREDYLQQNAFDDVDTFTSREKQFKMLKMILTFGEEGRRALSLGAYLSEIMDGTVSIRERIGRSKYIPETELEKLDQIIGEIKQTMQTIVSEGGMSND

SEQ ID NO: 2071 - protein, 417 aa, Glycine max
  unsure (1)..(417): unsure at all Xaa locations
QKTKKNPSIPCTSMSSLSTHHTYSRKQKSLGLLCTNFLSLYNKEGVRLIGLDDAASRLGVERRRIYDIVNILESVGXLARKAKNQCTWKGFSAIHVALQELKDEGLKENPGSSDDSNPSINLVLTVLGXDDEDEEETFPNINTGSQNVMVKSSSKNENRREKSLALLTQNFVKLFVCSNFEMISLDEAAKLLLGNANNRTKVRRLYDIANVLSSMNLIEKVIFSSVHFKFPHRALQWKCCFLYSVLINYSKLMMSLRRLQTHTTNTRKPAFRWLGVRGKTWSESAQTNVKESQKRMFGSDITNINFKRKVDLSMDGQNFKTQNQQENISPRAQLEKKSLKKDAKQTSMSYQFGPFAPAYVHKVGTSENNSVKQVQDWESLAQEHRPQYQNQGXALKDLFSHYMEAWKSWYSEAAKTL

SEQ ID NO: 2072 - protein, 310 aa, Desulfovibrio desulfuricans G20
MGAGKPRRDSPRGRCGRQPVRSWRQGHGHHQQPAVKGEHTMHTEHITSPADRLTMRIREANRQGRKALIPFLPAGFPDSGDFWRQLDELDAGGADVLEIGIPFSDPCADGPVVEQASLESLARGTTLRGVLEELERRKGRYRAGIVLMGYLNPFLQYGLDALARDAARAGVEGFIIPDLPLEEDALCRGALAAEGLALIPLVASNTDEDRMRAYAGVAQGYVYVVSVMGTTGARTDLPAGVTATLERARRCFDLPLALGFGVREPEQLAACGDRLDAVIFGSALISHIRTQGSAASFMERWRRPVAELVL

SEQ ID NO: 2073 - protein, 489 aa, Patagonula americana
  unsure (1)..(489): unsure at all Xaa locations
GSGVSTLEKKNLGRIVQIIGPVLDVAFPPGKMPNIYNALVVKGRDTVGQPINVTCEVQQLLGNNRVRAVAMSATDGLTRGMEVIDTGAPLSVPVGGATLGRIFNVLGEPVDNLGPVDTRTTSPIHRPAPAFIQLDTKLSIFETGIKVVDLLAPYRRGGKIGLFGGAGVGKTVLIMELINNIAKAHGGVSVFGGVGERTREGNDLYMEMKESGVINEENIAESKVALVYGQMNEPPGARMRVGLTALTMAEYFRDVNEQDVLLFIDNIFRFVQAGSEVSALLGRMPSAVGYQPTLSTEMGSLQERITSTKAGSITSIQAVYVPADDLTDPAPATTFAHLDATTVLSRGLAAKGIYPAVDPLDSTSTMLQPRIVGEEHYETAQRVKQTLQRYKELQDIIAILGLDELSEEDRLTVARARKIERFLSQPFFVAEVFTGSPGKYVGLAETIRGFQLILSGELDGLPEQAFYLVGNIDEATAKAMNLXMXSHLK

SEQ ID NO: 2074 - protein, 1583 aa, Cryptococcus neoformans var. neoformans
EPNYPPSDYHGGPGYLPSRASTPTFEGSNAGHRPREPYPAWTVDANIPLSKEEIEDVLIDLANKFGFQKDSSRNVYDFLMIQLDSRASRMSPNQALLTLHADYIGGEHANYRKWYFAAQLDLDDAIGAVQNPGLSRVRSVARRGGKTKNPLATAQEKSLESATSRWRTAMNNMSQYDRLRQVALYLLCWGEAAQVRFMPECLCFIFKCADDYYRSPECQNRQEAVPEGLYLRAVIKPLYRFLRDQGYEVVDGKFLRRERDHDKIIGYDDVNQLFWYPEGISRITLNDNTRLVDIPPAQRFMKFDRIDWNKVFFKTYLEKRSFFHLLVNFNRIWVLHISVFWFFTAYNAPSIYAPSGSTTATTPMAWSMTGLGGFVATLIMIAATLAEFSYIPTTWNNTSHLTRRLIFLLIILAITGGPSIYIAFFNQTGHVALILGIVQFFCSVVATIAFATLPSGRMFGDRVAGKSRKYLANQTFTASYPALGFYPRVASFLLWFLIFGCKFTESYFFLTLSFRDPMKVMNGMKVQNCHDKYFGSGLCTNQPAFALAVMFVMDLTLFFLDTFLWYVIWNTVFSIARSFAIGMSIWTPWKDIFARLPKRIYAKILATDDMEVKYKPKVLVSQVWNAVIISMYRGHLLSIDHVQKLLYHQIQSDQPGKRTLRAPAFFISQSEKGSKAEFFPKGSEAERRICFFAQSLTTSVPAPIPVDAMPTFTVLVPHYSEKILLSLREIIREEDQNTRVTLLEYLKQLHPVEWDNFVRDTKILAEESDAFNGGNPFASDEKEEAKKADDIPFYTIGFKSAAPEYTLRTRIWASLRAQTLYRTVSGFMNYSKAIKLLYRVENPEVVQLFGGNTDQLERELERMARRKFKFVVSMQRYSKFNKEEHENAEFLLRAYPDLQIAYLDEEPPRKDGGESRIFSALIDGHSEIMPNGRRRPKFRIELPGNPILGDGKSDNQNHAIVFYRGEYLQLIDANQDNYLEECLKIRNVLGEFEEFKVSTQSPYAAQGHADFAKFPVAILGAREYIFSENIGILGDIAAGKEQTFGTLAARSLSYIGGKLHYGHPDFLNGIYMNTRGGVSKAQKGLHLNEDIFAGMLAFGRGGRIKHSEYYQCGKGRDLGFGTILNFQTKIGTGMGEQMLSREYYYLGTQLPIDRFLTFYYGHPGFHINNILVMMSVQVFMLALVFLGTLNKQLTVCKYSSAGDILPGQSGCYNLVPVFRWIKRCIISIFIVFWIAFVPLFVQELTERGTGRAILRLCKHFLSLSPVFEVFSTQIYMHSILNDLTFGGARYIATGRGFATTRISFSILYSRLAGPSIYLGMRTLVLLLFITLTVWVPHLIYFWITVVGLCIAPFLFNPHQFAIADFIIDYREFLHRMSRGNSRTHANSWVGYCRLSRTRVTGFKRKRLGLPNEKLSSDVPRAPWKAILIGEIIGPICLAILLVICYLFIKSFAVDGQIQPGLVRIAIIALGPIVWNMALLITLFLISVFLGPCLNSYTHQFGATMAALAHFGAVAGMIVFYELLWILELWNTSQAVFGIIAVISVQRCIFKFLIAVFLTREFKHDETNRAWWTGVWFNRGLGSH

SEQ ID NO: 2075 - protein, 287 aa, Xylella fastidiosa Ann-1
MPFTIADATTLTEAGYVGEDVENIIQKLLQKCDYDVEKAQHGIVYIDEIDKISRKSENPSITRDVSGEGVQQALLKLIEGTVASVPPQGGRKHPQQEFLQVDTKNILFICGGAFAGLDKVIQQRCTEVGGIGFGVKVKSSESKRDVGKVLAGVEPEDLIKFGLIPEFVGRLPVVATLDELDESALVKILTEPKNAITKQFKKLFEMENVELEFRQDALSAVARKALKRKTGARGLRTIVELVLLDTMYELPSQEGISKVVVDESVIENKSEPYLIYQTMPAKVASGE

SEQ ID NO: 2076 - protein, 436 aa, Mesorhizobium loti
MTTFSPREIVSELDRFIIGQKDAKRAVAIALRNRWRRQQLEGQMREEVMPKNILMIGPTGVGKTEISRRLARLAGAPFVKVEATKFTEVGYVGRDVEQIIRDLVEIAIGLVREKMREDVKARAHINAEERVLEALVGKTASPATRDSFRKKLRDGELDDKEIEIEVADTGNGGMPGFEIPGMPGANIGVLNINDMLSKAMGGKKTKSRKTTVKESYDLLVSDESDKLLDQDEVVRRALDATENDGIVFLDEIDKIAARSDISGGPSREGVQRDLLPLVEGTTVATKYGPVKTDHILFIASGAFHVSKPSDLLPELQGRLPIRVELRALEKQDFVRILTETEASLIKQYIALMKTEGVDLTFTDDAIDSLAGIAVDLNDSVENIGARRLQTVMERVLDEISYDAPDRNGTSVTIDAAYVEKHVGDLSRNTDLSRFIL

SEQ ID NO: 2077 - protein, 623 aa, Prunus persica
  unsure (1)..(623): unsure at all Xaa locations
MPAVYGSRLTTFEDSEKESEYGYVRKVSGPVVVADGMAGAAMYELVRVGHDNLIGEIIRLEGDSATIQVYEETAGLMVNDPVLRTRKPLSVELGPGILGNIFDGIQRPLKTIAKISGDVYIPRGVSVPALDKDILWEFQPKKIGEGDTLTGGDLYATVFENSLMEHHVALPPDAMGKITYVAPPGQYSLKDTVLELEFQGVKKKFTMLQTWPVRTPRPVASKVAADTPLLTGQRVLDALFPSVLGGTCAIPGAFGCGKTVISQALSKYSNSDTVVYVGCGERGNEMAEVLMDFPQLTMTLPDGREESVMKRTTLVANTSNMPVAAREASIYTGITIAEYFRDMGYNVSMMADSTSRWAEALREISGRLAEMPADSGYPAYLAARLASFYERAGKVKCLGGPERTGSVTIVGAVSPPGGDFSDPVTSATLSIVQVFWGLDKKLAQRKHFPSVNWLISYSKYSTALESFYDQFDPDFINIXTKAREVLQREDDLNEIVQLVGKDALAEGDKITLETAKLLRGDYLAQNAFTPYDKFCPFYKSVWMMRNIIHYFNLANQAVEKAAGMDGQKISYSLIKHRLGDLFYRLVSQKFEDPAEGEEVIVGKFKKLHEDLTSGFRALEDETR

SEQ ID NO: 2078 - protein, 249 aa, Rosa rugosa
MAYENKPNTVLDSDAQRRLGRGKIEIKRIENTTNRQVTFCKRRNGLLKKAYELSVLCDAEVALIVFSNRGRLYEYSNNSSVRETIERYKKACADSSNNGSVSEATTQYYQQEAAKLRAQITTLQNSNRGYMAEGLSNMSIKELKGVETKLEKAISRIRSKKNELLFAEIEYMQKRELDLHNNNQLLRAKIAENERHQQSINAIAGGHGSYDIMQPTQPFHEARNYFQVNALQPNIHQYSRHDQISLQLV

SEQ ID NO: 2079 - protein, 160 aa, Auricularia auricula-judae
LEECLKIRSVLAEFEEMKADEVSPYTPGIKSEAKYPVAILGAREYIFSENIGILGDIAAGKEQTFGTMFARTMSQIGGKLHYGHPDFLNGIFMTTRGGVSKAQKGLHLNEDIYAGMNALLRGGRIKHCEYYQCGKGRDLGFGSILNFTTKIGLVWANICL

SEQ ID NO: 2080 - protein, 556 aa, Halobacterium sp. NRC-1
MNDVVYVGDEGLMGEVIEIEGDVTTIQVYEETSGIGPGQPVDNTGEPLTVDLGPGMLDSIYDGVQRPLDVLEDEMGAFLDRGVDAPGIDLDTDWEFEPTVEAGDEVAAGDVVGTVDETVSIEHKVLVPPRSDGGEVVAVESGTFTVDDTVVELDTGEEIQMHQEWPVRRQRPTVDKQTPTEPLVSGQRILDGLFPIAKGGTAAIPGPFGSGKTVTQQSLAKFADADIVVYIGCGERGNEMTEVIEDFPELPDPQTGNPLMARTTLIANTSNMPVAARESCIYTGITIAEYYRDMGYDVALMADSTSRWAEAMREISSRLEEMPGEEGYPAYLAARLSEFYERAGYFENFNGTEGSISVIGAVSPPGGDFSEPVTQNTLRIVKTFWALDSDLAERRHFPAINWDESYSLYKDQLDPWFTDNVVDDWAEQRQWAVDILDEESELEEIVQLVGKDALPEDQQLTLEVARYIREAWLQQNALHDVDRYCPPEKTYAILSGIKTLHEESFEALDAGVPVEEITSIDAAPRLNRLGTTPDDEHEAEVAEIKQQITEQLRELY

SEQ ID NO: 2081 - protein, 526 aa, Aspergillus oryzae
MAASSSLDHLSNRMKLEWHSKLNTEMVPAKNFRRTSIIGTIGPKTNSVEKINALRRSGLNVVRMNFSHGSYEYHQSVIDNAREAARVQTGRPLAIALDTKGPEIRTGNTTDDKDIPIKEGHELNITTDEKYANASDDQNMYLDYKNITNVIAPGKLIYVDDGILSFQVLEVVDDKTLRVKCLNNGNISSRKGVNLPGTDVDLPALSEKDISDLKFGVKNGVDMIFASFIRRGSDIRHIRDVLGEEGKEIQIIAKIENQQGVNNFDEILEETDGVMVARGDLGIEIPAPKVFIAQKMMIAKCNIKGKPVICATQMLESMTYNPRPTRAEVSDVANAVLDGADCVMLSGETAKGSYPCEAVKMMSETCLLAEVAIPHFNVFDELRNLAPRPTDTVESIAMAAVSASLELNAGAIVVLTTSGNTARLLSKYRPVCPILMVTRNPRASRYSHLYRGVWPFLFPENKPDFNVKIWQEDVDRRLKWAISHGIKLGIINKGDNIVCVQGWRGGQGHTNTVRVVPAEENLGLIE

SEQ ID NO: 2082 - protein, 503 aa, Secale cereale
MAGNMLANYVQVYVMLPLDVVSVDNKFEKGDEIRAQLKKLTEAGVDGVMIDVWWGLVEGKGPKAYDWSAYKQVFDLVHEAGLKLQAIMSFHQCGGNVGDVVNIPIPQWVRDVGATGPTFFYTNRSGTRNIEYLTLGVDDQPLFHGRTAVQMYADYMASFRENMKKFLDAGTIVDIEVGLGPAGEMRYPSYPQSQGWVFPGIGEFICYDKYLEADFKGAAAKAGHPEWELPDDAGEYNDTPEKTQFFKENGTYLTEKGKFFLSWYSNKLIKHGDKILDEANKVFLGCRVQLAIKVSGIHWWYRVPNHAAELTAGYYNLDDRDGYRTIARMLTRHHASMNFTCAEMRHSEQSEEAKNAPEELVQQVLSAGWREGLHVACENALGRYDATAYNTILRNARPKGINENGPPQHKLYGFTYLRLSNELQEGQNYATFQTFVEKMHANLGHDPTVDPVAPLERSKPEMPIEMILKAARPKLEPFPFDKNTDLPVKDHTDVGDEVFLAPV

SEQ ID NO: 2083 - protein, 103 aa, Desulfitobacterium hafniense
MNRIDAKFQHLQAAGRKALIPFLTAGDPSLEATVPAMHALVEAGADVIELGVPFSDPMADGPTIQRSSERAIARGAGLGWVLKAVAQFRQRDADTPVVLMGYL

SEQ ID NO: 2084 - protein, 234 aa, Triticum aestivum
MCPPRSDHRKEKSLGLLTQNFVKLFLTMEVETVSLDEAARLLLGERHAESNMRTKVRRLYDIANVLSSLNLIEKTQQVDSRKPAFRWLGQAKRKEGATVTVALPPSRKIMSSKRAFGTDITNIDNKRGKLVLETENKPKLMQGGSSMLKTFESQLGQGKSSGFVYGPFHPAGARKHEVDDQTVRENEMKNIQDWENLAVSFRPQYQNHALNDLFGHYVEAWKSWYLDLTRESTS

SEQ ID NO: 2085 - protein, 498 aa, Sorghum bicolor
MRTNPTTSRPGVSTIEEKSVGRIDQIIGPVLDITFPPGKLPYIYNALIVKSRDTADKQINVTCEVQQLLGNNRVRAVAMSATDGLMRGMEVIDTGTPLSVPVGGATLGRIFNVLGEPIDNLGPVDTSATFPIHRSAPAFIELDTKLSIFETGIKVVDLLAPYRRGGKIGLFGGAGVGKTVLIMELINNIAKAHGGVSVFGGVGERTREGNDLYMEMKESGVINEKNIEESKVALVYGQMNEPPGARMRVGLTALTMAEYFRDVNKQDVLLFIDNIFRFVQAGSEVSALLGRMPSAVGYQPTLSTEMGSLQERITSTKKGSITSIQAVYVPADDLTDPAPATTFAHLDATTVLSRGLASKGIYPAVDPLDSTSTMLQPRIVGNEHYETAQRVKETLQRYKELQDIIAILGLDELSEEDRLTVARARKIERFLSQPFFVAEYFTGSPGKYVGLAETIRGFQLILSGELDGLPEQAFYLVGNIDEASTKAINLEEESKLKK

SEQ ID NO: 2086 - protein, 486 aa, Vibrio cholerae
MCKTKIVATLGPASQTRETLTQLIQAGVNVVRLNFSHGSAEEHIARAEMVREIAQQLNVSVGVLVDLQGPKIRIACFAEGAIQLSAGDTFILDGHLDGQAGTQERVGLDYPELIDDLNVGNILLLDDGRIQLEVTAVDMQARLVHTIALNSGKLSNRKGINLLGGGLSAPALTEKDKLDIITAAELQADFLAVSFPRNAEDIEYARQLATQAGCHAHIVAKVERAEVVASEEAMDSVIRASDVIMVARGDLGVEIGDARLPSVQKALIARAKHLGKPVITATQMMESMIENPLPTRAEVLDVANAVIDGTDAIMLSAESAAGRYPVETVQAMVRIAQGVEHETHCAQNCWDALQHLCSDAGKSFALSSMISASKVNKDLGVAIVTEQGETPLLMSRCQSQATIWAVSDKPALLRKLAILRGVTPTYFPHLDKQGDIATQLIHLLRKPAQEKKIASILVTQLESVEGVGHVNVCRLLNLAQQEALFA

SEQ ID NO: 2087 - protein, 490 aa, Itzaea sericea
  unsure (1)..(490): unsure at all Xaa locations
MXXNPTTSDSEVSAVEKKNLGRIVQIIGPVLDVAFPPGKMPKIYNALVVQGRDKEQTDVTCEVQQLLGNNRVRAVAMSDTDGLKRGMQVIDTGAPISVPVGGSTLGRIFNVLGEPVDNLGPVDTNTTSPIHRSAPAFIQLDTKLSIFETGIKVVDLLAPYRRGGKIGLFGGAGVGKTVLIMELINNIAKAHGGVSVFGGVGERTREGNDLYMEMKESGVINEENIAESKVALVYGQMNEPPGARMRVGLTALTMAEYFRDVNEQDVLLFIDNIFRFVQAGSEVSALLGRMPSAVGYQPTLSTEMGSLQERITSTKEGSITSIQAVYVPADDLTDPAPATTFAHLDATTVLSRGLAAKGIYPAVDPLDSTSTMLQPRIVGEEHYETAQRVKQTLQRYKELQDIIAILGLDELSEEDRLTVARARKIERFLSQPFFVAEVFTGSPGKYVGLAETIRGFQLILSGELDGLPEQAFYLVGNIDEATAKAMNLKT

SEQ ID NO: 2088 - protein, 458 aa, Aeropyrum pernix
MRGPVKIVATVGPSSSSASILAQMLSLGVDVARINASHGGVEQWNSMLESLRRAEEAVGKRVGVAVDLEGPRVRTGNSEPVKLEKGDLVTLGFMEGDVPVDARQFFETIDEGDIVLLDDGKIILQVESVEGFRVKARVLEGGVLGPRKGVVVRGKEPDLPPLSAKDRRALEFFADKGVSHVYVSFARSAEHVEKVRTVVRRLGLRQARIFAKIEGPSGVSRIGEIAEASDGVIIARGDLGMHYSLEELPEIQELIVWEARKRYKTVVLATEFLSSMIEKPVPTRSEVVDIYQAVLQTADALMLTGETAIGKYPVKSVQWMAKISSRAYKKLATSPPERPRPTSTPYKLALGLVELAESLDSPLVVYSKTGRFAERLASFKPLKTFYVGVPSREVERVVRHLWGAEPIVVGDYPYEAGLAKTYEKLRRENIIHGDETVVEAAWSSERGIYIIRVRNLEF

SEQ ID NO: 2089 - protein, 542 aa, Yarrowia lipolytica
MIYTANSSPSTNLQWLSTLNTDDIPTKNYRKSSIIGTIGPNTNSAEMISKLRQAGLNIVRMNFSHGSYEYHQSVIENARESEQRFRGRPLAIALDTKGPEIRTGVTKDDKDWDVKAGHVMLFSTNPKYKDQCDDKIMYIDYTNIVKQIDIGKIIFVDDGVLSFKVLEKIDGETLKVETLNNGKISSRKGVNLPGTDVDLPALSEKDKADLKFGVEHGVDMIFASFVRTANDVQAIRDVLGEKGKGIQVISKIENQQGVNNFDEILKETDGVMVARGDLGIEIPAPQVFIAQKQLIAKCNLAGKPVICATQMLDSMTYNPRPTRAEVSDVGNAVLDGADCVMLSGETAKGTYPIESVKMMHETCLVAEKAIAYAPLFNEMRTLTVRPTETVETIAISAVSASFEQQARAIIVLSTSGTSARLCSKYRPNCPILMVTRNAQAARFSHLYRGVYPFIYHKARASNPAEWQHDVEERLKWGMDEAVALGILNKGDVVVAIQGWTGGLATPTLSEFSSVSKLFNTNLLDYKTYSMVIKSVNGGVLYK

SEQ ID NO: 2090 - protein, 265 aa, Lactobacillus plantarum WCFS1
MMTDLTTIFKNHKAFIAFVVAGDPNFEATVDQVVALAEAGCDLVEIGIPFSDPVADGPEIQAADLRAFDQHITPQRVFELVVAIREKTTIPLVFLTYANIVYQFGYAAFAQQCQSLNVAGLIIPDMPLEASGELRPTLDHYGIALIPLIAPTSDDARIAAIAQQARGFIYVVSSLGVTGTRRHITTDLATLVAKIRHATTLPVAIGFGIHEPAQAQAMAQIADGVIVGSAVVHLIATHQPATAVLRDYTRRMRRALDGRTADTVD

SEQ ID NO: 2091 - protein, 429 aa, Glycine max
  unsure (1)..(429): unsure at all Xaa locations
APPPQQRSSTIENSSPCRPNPTSSFSLQYLYPNPPFLNKNKKIKKNPSISWTSMTSLSTHHTYSRKQKSLGLLCTNFLSLYNKEGVRLVGLDDAASRLGVERRRIYDIVNVLESVGVLTRKAKNQYTWKGFCAIPAALQELKDEGLKENPGSFDDSNDNAKVSDDEEEEEETFPNINIGSQSEKENPDYTATVKSSKNENRREKSLALLTQNFVKLFVCSNFEMISLDEAAKLLLGNANNRTKVRRLYDIANVLSSMNLIEKTHTTNTRKPAFRWLGVRGKTWGGSVDLAQNSNVKESRKRMFGTDIGNISFKRNKVDLSMDGQNSKMQNQHENISPRAQLEKIIIKKDAKQTSESYQFGPFAPAYVPKVGTSENNSVKKVHDWDSLAQEHRPQYQNQGXALKDLFSHYMEAWKSWYSEAAGKKSTKTL

SEQ ID NO: 2092 - protein, 242 aa, Shigella boydii
LKERKEGAFVPFVTLGDPGIEQSLKIIDTLIEAGADALELGIPFSDPLADGPTIQNATLRAFAAGVTPAQCFEMLALIRQKHPTIPIGLLMYANLVFNKGIDEFYAQCEKVGVDSVLVADVPVEESAPFRQAALRHNVAPIFICPPNADDDLLRQIASYGHGYTYLLSRAGVTGAENRAALPLNHLVAKLKEYNAAPPLQGFGISAPDQVKAAIDAGAAGAISGSAIVKIIEQHINEPEKML

SEQ ID NO: 2093 - protein, 472 aa, Mycobacterium leprae
MTRRGKIVCTLGPATQSDELIRALVEAGMDVARMNFSHGDYSDHKAVYDRVRVASDATGRAVGVLADLQGPKIRLGRFATGSTYWADGETVRITVADCHGSHDRVSTTYKNLARDAVVGDRVLVDDGKVGLVVSAIDGDDVVCTVTEGGPVSNNKGMSLPGMHVSAPALSDKDIEDLTFALNLGADLVALSFVRSPSDVELVHKAMDRVGRRVPVIAKLEKPEAVDNLEAIVLAFDAIMVARGDLGVELPLEEVPLVQKRAIQMARENAKPVIVATQMLDSMIENSRPTRAEASDVANAVLDGADALMLSEETSVGKYPLAAVKTMSRIVCAVEENSTAAPPLTHVPRTKRGVISYAARDIGERLDAKALVAFTQSGDTVRRLARLHTPLPLLAFTAWPEVRSQLAMTWGTETFLVPKMLSTDGMIRQVDKSLLELGRYKRGDLVVIVAGTPPGTVGSTNLIHVHRIGEDDV

SEQ ID NO: 2094 - protein, 128 aa, Glycine max
  unsure (1)..(128): unsure at all Xaa locations
MALLPRLFLFGVXAVALAIGLANAVHGEAAPVVVGLARCSDCTRKNMNAEAAFKGLQVAVKCKNGKGEYESKSVGPVDKSGAFSVPLDVGLVGDGGELKQDCFAQLHSASGAPCPGQEPSKIVAARPG

SEQ ID NO: 2095 - protein, 501 aa, Saccharomyces castellii
MESRLARLTTLQVTAGDNLRRTSIIGTIGPKTNNPEVLVALRKAGLNIVRMNFSHGSYEYHQSVIENARKSEELYPGRPLAIALDTKGPEIRTGTTTGEVDYPIPPNHEMIFSTDEKYAKACDDKVMFVDYANITKVISKGKIIYVDDGVLSFEVLEVVDGKTLKVKSLNAGKICSHKGVNLPGTDVDLPALSEKDKADLRFGVKNGVHMVFASFIRTAQDVLTIREVLGEDGKDIKIVVKIENQQGVNNFDEILKVTDAVMVARGDLGIEIPAPEVLAVQKKLIAKSNLAGKPVICATQMLESMTYNPRPTRAEVSDVGNAILDGADCVMLSGETAKGNYPINAVTTMADTALIAEQAIAYQPLYDDLRNLTPKPTSTTETVAASAVAAVYEQKAKAIIVLSTSGTTPRLVSKYRPDCPIILVTRNPRAARFSHLSRGVFPFVYEADSVADWTEDVELRLKFGIEKAIEMGVMKKGDTYVSIQGFKAGEGHSNTLQVSNA

SEQ ID NO: 2096 - protein, 268 aa, primary endosymbiont of Bemisia tabaci
MKLNKRIINCFEQKKRAAFVTFITAGDQDYEKSLTLINSLPKAGADIIELGMPFTDPIADGEIIQKSTQRSLKTGQNQKKTLELVKAFRLFNKKTPIILMGYYNPIYRYGIKKFIKDAKNAQIDGLIIVDLPPEHAQEVSVPANKQGIDFINIITPNTNIKRIPFIVKNSSGYIYYISINGVTGGSVPIFYEVEKAVKLIRKYTNLPIAVGFGVKNRNSVKKLANISDAVVVGSALLKQIEIHCYDQKTAISNVLNLTSRLSRGLVKI

SEQ ID NO: 2097 - protein, 487 aa, Diospyros digyna
MKINPTTSGPGASVLEKKNLGRIVQIIGPVLDVAFPPGKMPNIYNSLVVKGRDTVGQPINVTCEVQQLLGNNRVRAVAMSATDGLTRGMEVIDTGAPLSVPVGGVTLGRIFNVLGEPVDNLGPVDTRTTSPIHRSAPAFIQLDTKLSIFETGIKVVDLLAPYRRGGKIGLFGGAGVGKTVLIMELINNIAKAHGGVSVFGGVGERTREGNDLYMEMKESGVINEQNIAESKVALVYGQMNEPPGARMRVGLTALTMAEYFRDVNEQDVLLFIDNIFRFVQAGSEVSALLGRMPSAVGYQPTLSTEMGSLQERITSTKEGSITSIQAVYVPADDLTDPAPATTFAHLDATTVLSRGLAAKGIYPAVDPLDSTSTMLQPRIVGEEHYETAQRVKQTLQRYKELQDIIAILGLDELSEEDRLTVARARKIERFLSQPFFVAEVFTGSPGKYVGLAETIRGFQLILSGELDGLPEQAFYLVGNIDEATAKA

SEQ ID NO: 2098 - protein, 197 aa, Lycopersicon esculentum
SVLCDAEVALVVFSNRGRLYEYANNSVKATIERYKKACSDSSNTGSVSEANAQYYQQEASKLRAQIGNLMNQNRNMMGEALAGMKLKELKNLEQRIEKGISKIRSKKNELLFAEIEYMQKREVDLHNNNQYLRAKIAETERAQHQHQQMNLMPGSSSNYHELVPPPQQFDTRNYLQVNGLQTNNHYPRQDQPPIQLV

SEQ ID NO: 2099 - protein, 427 aa, Myxococcus xanthus
MAGKNVEKRDNQTLCCSFCGKSQKEVKKLIAGPTVYICDECIGLCNDIIAEEIDREETKDTKLRIPRPSEIKAVLDEYVIGQERAKKTLSVAVHNHYKRIESKVAMEDVELQKSNILLLGPTGSGKTLLAQTLARILNVPFTIADATCLTEAGYVGEDVENIIVNLLQAADHDIERAQRGIVYIDEIDKIARKSENPSITRDVSGEGVQQALLKLIEGTVANVPPKGGRKHPQQEFLQVDTTNILFICGGAFGGLDQVIERRMGGRSLGFGADVQSKKQRSLTELLKHVEPEDLLKFGMIPEFIGRLPIITALEELDEAALINILNQPKNALTKQYRKLFELDGVTLKFTDGALKAIANEAIRRKAGARGLRSILESAMLDVMYEIPSRKTAREVLISEEVILKKSEPVVLHAQPEKEAAEPKKESA

SEQ ID NO: 2100 - protein, 463 aa, Bacillus anthracis str. A2012
MHLHFTPRQIVEKLDQYIIGQKDAKKAVAVALRNRYRRSKLAENLRDEIAPKNILMIGPTGVGKTEVARRMAKLVGAPFIKVEATKFTEVGYVGRDVESMVRDLVETSVRIVKEEMVVKVQDKAEEQANQRLVEILVPSPEKQSGFKNPLEMLFGGTQNSNQTTDSQEDVEIEKKRQDVERKLAAGLLEDEIVSIEVTEQQSSMFDMLQGTGMEQMGMNFQDALGSFMPKKTKKRKLSVKEARKVLTNEEAQRLIDMDEVTQEAVYRAEQLGIIFIDEIDKIAGKQSNSVDVSREGVQRDILPIVEGSNVATKYGSVKTDYILFVAAGAFHMSKPSDLIPELQGRFPIRVELTKLSTDDFVKILIEPDNALIKQYMALLATEGIEIEFSDEAIRKIAEIAYQVNQDTDNIGARRLHTIMEKLLEDLSFEASEITLEKITITPQYVEEKLATIAKNKDVSQIIL

SEQ ID NO: 2101 - protein, 238 aa, Populus balsamifera subsp. trichocarpa
MAYQNEPQESSPLRKLGRGKVEIKRIENTTNRQVTFCKRRNGLLKKAYELSVLCDAEVALIVFSSRGRLYEYSNNSVKSTIERYKKACADSSNNGSVSEANAQFYQQEAAKLRSQIGNLQNSNRNMLGESLSALSVKELKSLEIKLEKGIGRIRSKKNELLFAEIEYMQKREIDLHNNNQLLRAKIAENERKRQHMNLMPGGVNFEIMQSQPFDSRNYSQVNGLPPANHYPHEDQLFS

SEQ ID NO: 2102 - protein, 345 aa, Glycine max
  unsure (1)..(345): unsure at all Xaa locations
AFRTLQQVWEVLCMDIREGVPTTNMTGPSIRFSVSQRLNLNLELAKAMHHKCTALSNWNGLIQELLANAMYIYGIVTGLLQHYLKKMRHYAGELPLLTADYGSSEGWIAANVNPQLPPEYATYAVLPHIGYFEFIPLLELENTKPLGLTQVKVGQEYEIVMTNPAGLYRYRLGDVVKVMGFHNSTPELKFIXRSSLLLNINIDKNTEKDLQLAVEAAGKLLAEEKLEVVDFSSQVDLSKEPGHYVIFWEISGDASQELLHECCNCLDKSFVDAGYTSSRKVNCIGALELRLVRRGTFQKILDHYLGLGTAVSQYKTPRCVGPTNTRVLQILSENVVNNYLSTAFN

SEQ ID NO: 2103 - protein, 631 aa, Glycine max
MKSSLKKLRGLALHNHKHVSSKSIRPLGQLDELARATQDMQDMRDCYDTLLSAAAATASSAYEFSESLRDMGSCLLQKTALNDHGDETGKLLLMLGKIQFKLHKLIDHYRSHIFQTITIPSESLLNELRIVEEMKRQCDEKRDLYDYMVTRYREGGRSKGGKGETFSLQQLQTAHDEYDEEATLFVFRLKSLKQGQSRSLLTQAARHHAAQLCFFKKAVKSLETVEPHVKSVTEQQHIDYHFSGLEEEDGDEGDYGDDVGGGYDENDDGELSFDYGQIEQDQDVSTSRNSMELDQVELTLPRDSTAEAAKENLDNLVRNLFSFKVRAGSQSAPLFADNKPDASEKLRQMRPSLSRKFSSYVLPTPVDAKSSTSSGSNNPKPSKMQANLNEPTKNLWHSSPLEQKKQEKDIGDEFSGSIVRSAQSVLKESNSNTASMRLPPPLIDSLLSSNRDYISAYSKKIKRHAFSGPLTSNPGPTKPVSVESVQLFSGPLLPAPIPQPPSSSPKASPSASPTLMTSPKISELHELPRPPTSFPSNSRLLGLVGHSGPLVSRGQKVTANNLVASSAASPLPMPPQAMARSFSIPSSGARVAALHMPRTLESSHRSSISENIASPPLMPISLSSSRPSLDG

SEQ ID NO: 2104 - protein, 1337 aa, Saccharomyces castellii
MSYHDRDVHNQEPTIDQYGQPIYPQDDSYSQDGESHQEQYMNENYSDFSSFAAPNGAHNNTNSASTYDDSYGGQYTSSQVSYSEQTGTSTPVFGSGPFNMPDGLNVGLPNDPYPAWTADEDAPVNIEQIEDIFIDLTNKFGFQRDSMRNIFDHFMTLLDSRASRMTPAQALISLHADYIGGDTSNYKKWYFAAQLDMDDEIGFRNVKMGKLSRKARKAKKSNKKAIKHSSPEAVEATLQQLEGDNSLQAADYRWKAKMSSLSPEEMVRQLALYLLCWGEANQVRFTSECLCFIYKCAYDYYQSPECQQRTQPLPEGDYLNRIISPLYHFLRDQVYEVADNRYIKRERDHNKVIGYDDVNQLFWYPEGIAKIIMEDGRKLIDLPSEDRYLRLGDVIWGNVFFKTYKETRTWLHMVTNFNRIWIMHISVYWMYVAYNAPTLYTHNYQQLVDNQPLASYRWATAALGGTVASLIQLVATLCEWTFVPRNWAGAQHLSRRFMFLFFIFAANFAPVLFVFIYEKDTVYSKAGYIVGIVMFFVAVVTMVYFSVMPLGGLFTSYMNKSSRRYVASQTFTASFAPLKGIDRWLSYLVWVVVFGAKYAESYYFLILSLRDPIRILSTMTMRCTGEYWWGAKLCKHQSKIVLGLMIATDFILFFLDTYLWYIIVNTIFSVGKSFYLGISVLTPWRNIFTRLPKRIYMKILATSHAQVKYKPKVLISQVWNAIIISMYREHLLAIDHVQKLLYHQVLSEVQGKRSLRAPTFFTSQDGKSIEGEFFPKDSEAERRISFFAQSLTIPIKEPLPIDNMPTFTVLTPHYSERILLSLREIIREDDQFSRVTLLEYLKQLHPLEWDCFVKDTKILAEETAIYEGNEEETDKDDAMKSEIDDLPFYCIGFKSAAPEYTLRTRIWASLRSQTLYRTVSGFMNYSRAIKLLYRVENPEIVQMFGGNAEGLERELEKMTRRKFKFLVSMQRLAKFKPHELENAEFLLRAYPDLQIAYLDEEPPLNEGEEPRIYSALIDGHCEILENGRRRPKFRVQLSGNPILGDGKSDNQNHALIFYRGEYIQLIDANQDNYLEECLKIRSVLSEFEEIYAEPFNPYIPGMKYEEQTTNHPVAIVGAREYIFSENSGVLGDVAAGKEQTFGTLFARTLSQIGGKLHYGHPDFINATFMTTRGGVSKAQKGLHLNEDIYAGMNAMLRGGRIKHCEYYQCGKGRDLGFGTILNFTTKIGAGMGEQMLSREYYYLGTQLPIDRFLSFYYAHPGFHLNNLFIQLSLQMFMLTLVNLHALAHESIICLYDRNKPITDVQYPLGCYNLAPVNDWVRRWELEFHHRARINRRP

SEQ ID NO: 2105 - protein, 489 aa, Borago officinalis
  unsure (1)..(489): unsure at all Xaa locations
INPTTSSSGGSTLEKKNLGRIVQIIGPVLDVAFRLGKMPNIYNALVVKGRDTVGQPINVTCEVQQLLGNNRVRAVAMSATDGLTRGMEVIDTGAPLSVPVGGATLGRIFNVLGEPVDNLGPVDTRTTSPIHRSAPAFIQLDTKLSIFETGIKVVDLLAPYRRGGKIGLFGGAGVGKTVLIMELINNIAKAHGGVSVFGGVGERTREGNDLYMEMKESGVINEENIAESKVALVYGQMNEPPGARMRVGLTALTMAEYFRDVNEQDVLLFIDNIFRFVQAGSEVSALLGRMPSAVGYQPTLSTEMGTLQERITSTKSGSITSIQAVYVPADDLTDPAPATTFAHLDATTVLSRGLAAKGIYPAVDPLDSTSTMLQPRIVGEEHYETAQRVKQTLQRYKELQDIIAILGLDELSEEDRLTVARARKIERFLSQPFFVAEVFTGSPGKYVGLAETIRGFQLILSGELDGLPEQAFYLVGNIDEATAXAMNLE

SEQ ID NO: 2106 - protein, 477 aa, Arabidopsis thaliana
MAFTSMVSTVPVLFFFFTLLLISANSSSLSHNIKVQEQDKDPFVGFNIGTDVSNLLSPTELVKFLQAQKVNHVRLYDADPELLKALAKTKVRVIISVPNNQLLAIGSSNSTAASWIGRNVVAYYPETLITAISVGDEVLTTVPSSAPLLLPAIESLYNALVASNLHTQIKVSTPHAASIMLDTFPPSQAYFNQTWHSIMVPLLQFLSKTGSPLMMNLYPYYVYMQNKGVVPLDNCLFEPLTPSKEMVDPNTLLHYTNVLDAMVDAAYVSMKNLNVSDVAVLVTESGWPSKGDSKEPYATIDNADTYNSNLIKHVFDRTGTPLHPEMTSSVYIYELFNEDLRAPPVSEASWGLFYGNSTPVYLLHVSGSGTFLANDTTNQTYCIAMDGVDAKTLQAALDWACGPGRSNCSEIQPGESCYQPNNVKGHASFAFNSYYQKEGRASGSCDFKGVAMITTTDPSKLFFSSSFSLVMVYSLKI

SEQ ID NO: 2107 - protein, 630 aa, Burkholderia fungorum
MATRSPTAKSANARGGKPRNSAAASAGERAARSAATPAAGSAGEFASGPASQQHEESGSPLGLAELTTAGKAAKSSSADAVQTAPSPAELPDEEIALISPPAPPVLLSNTASPYKATLVSTGAQPPAASFGAQPPHPTRSALSSDLTQTRRLMHRATKIVATIGPASNTPEILLQMIQAGLDVVRLNFSHGTADDHRQRAGFVREAARQAGREVAIMADLQGPKIRVGKFENGKIMLVAGEPFVLDADCELGNEQRAGLDYKDLPRDLKPGDVLLLNDGLIVLNVSRVIGNEIHTVVKIGGELSNNKGINRQGGGLSAPALTAKDMEDIRTAMSLGVDYVAVSFPKNATDMEMARQLANIAGAPFGVKPKMIAKIERAEAIPALQGILDASDGIMVARGDLAVEVGNAAVPALQKRMIRMARESNKFVITATQMMESMIHAPVPTRAEVSDVANAVLDGTDAVMLSAESAAGKYPVQTIETMAAICIEAEKSEQSELDKDFLDRTFTRIDQSIAMGALFTAFHLGAKAIVALTESGSTALWMSRHWTHVPIFALTPRVGSERAMALYRNVTSLHLDTNTDRDTALQQALETVVSKGYASRGDMVVLTVGEPMGQAGGTNTLKIVRVGEPY

SEQ ID NO: 2108 - protein, 346 aa, Nicotiana sp.
QFLFSLQMAHLIVTLLLLSVLTLATLDFTGAQAGVCYGRQGNGLPSPADVVSLCNRNNIRRMRIYDPDQPTLEALRGSNIELMLGVPNPDLENVAASQANADTWVQNNVRNYGNVKFRYIAVGNEVSPLNENSKYVPVLLNAMRNIQTAISGAGLGNQIKVSTAIETGLTTDTSPPSNGRFKDDVRQFIEPIINFLVTNRAPLLVNLYPYFAIANNADIKLEYALFTSSEVVVNDNGRGYRNLFDAILDATYSALEKASGSSLEIVVSESGWPSAGAGQLTSIDNARTYNNNLISHVKGGSPKRPSGPIETYVFALFDEDQKDPEIEKHFGLFSANMQPKYQISFN

SEQ ID NO: 2109 - protein, 485 aa, Trochetiopsis erythroxylon
  unsure (1)..(485): unsure at all Xaa locations
SGVSTLEXXNLGRISQIIGPVLDVAFPPGKMPNIYNALVVKGRDTVGQQINVTCEVQQLLGNNRVRAVAMSATDGLTRGMEVIDTGAPLSVPVGGATLGRIFNVLGEPVDNLGPVDTRTTSPIHKPAPAFIQLDTKLSIFETGIKVVDLLAPYRRGGKIGLFGGAGVGKTVLIMELINNIAKAHGGVSVFGGVGERTREGNDLYMEMKESGVINEQNLAESKVALVYGQMNEPPGARMRVGLTALAMAEYFRDVNEQDVLLFIDNIFRFVQAGSEVSALLGRMPSAVGYQPTLSTEMGTLQERITSTKEGSITSIQAVYVPADDLTDPAPATTFAHLDATTVLSRGLAAKGIYPAVDPLDSTSTMLQPRIVGEEHYETAQRVKQTLQRYKELQDIIAILGLDELSEEDRLTVARARKIERFLSQPFFVAEVFTGSPGKYVGLAETIRGFKLILSGELDGLPEQAFYLVGNIDEATAKATNLEMES

SEQ ID NO: 2110 - protein, 589 aa, Lactobacillus delbrueckii subsp. lactis
MKKTKIVSTLGPASNDIETITKLAEAGANVFRFNFSHGDHEEHLARMNMVREVEKKTGKLLGIALDTKGAEIRTTDQEGGKFTINTGDEIRVSMDATKAGNKDMIHVTYPGLFDDTHVGGTVLIDDGAVGLTIKAKDEEKRELICEAQNTGVIGSKKGVNAPGVEIRLPGITEKDTDDIRFGLKHGINFIFASFVRKAQDVLDIRALCEEANAPYVKIFPKIESQEGIDNIDEILQVSDGLMVARGDMGVEIPFINVPFVQKTLIKKCNALGKPVITATQMLDSMQENPRPTRAEVTDVANAVLDGTDATMLSGESANGLYPVESVQAMHDINVRTEKEMDTRNTLALQRFEEYKGSNVTEAIGESVVRTAQELGVKTIITATSSGYTARMISKYRPDATIVALTFDEKIQHSLGIVWGVEPVLAKQPSNTDEMFEEAARVAKEHGFVKDGDLVIIVAGVPFGQSGTTNLMKLQIIGNQLAQGLGVGTGSVIGKAVVANSAEEANNKVHEGDILVAKTTDKDYMPAIKKASGMIVEASGLTSHAAVVGVSLGIPVVVGAADATSKIADGSTLTVDARRGAIYQGEVSNL

SEQ ID NO: 2111 - protein, 618 aa, Streptomyces coelicolor A3(2)
MDFGTQGPQAPAELAWLRGVDAYTMGAYPQAEEEFRAAVRIDPTMADGWLGLHALRVDTTNALLRMFRNRDRFGEQRARHRRTLNSWYWLGWWVQPVLENPRDLLLAHASHWLDGRHVPELDRALAGLPPVDSDAQVRFLHACRAYLVKDWEQLVRHTDPLLGDPLLGIEAGLFSGMARVRLEMYGQAEPLLSAALMRCRSEQPQRKELRYWLARAHEGTGRSAAALPLYRAVHRVDPAFMDTSARLAAIAEGDGYDDPADLTGYAQAGAGTDGLDGLDPLFGTEERGVKVSAPEPALSAPLPPLGGPSVREKAGGPDPSLPSGPTDPALLEEALAELERMVGLEPVKRQVKALSAQLNMARLRAGQGLPVQPPKRHFVFSGPSGTGKTTVARILGRVFYALGLLGGDHLVEAQRADLVGEYLGQTAVKANELIDSALGGVLFVDEAYSLSNSGYGKGDAYGDEALQVLLKRAEDNRDHLVVILAGYPEGMDRLLGANPGLSSRFTTRVDFPSYRPLELTSIGEVLAAENGDVWDEEALDELRSIAGHVVDQGWIDELGNGRFLRTLYEKSCAYRDLRLSVYPGALTRDDLATLRLPDLMQAYGEVLSGRGPGGPSAG

SEQ ID NO: 2112 - protein, 489 aa, Ehretia cymosa
GSGVSTLEKKNLGRIVQIIGPVLDVAFPPGKMPNIYNALVVKGRDTVGQPINVTCEVQQLLGNNRVRAVAMSATDGLTRGMEVIDTGAPLSVPVGGATLGRIFNVLGEPVDNLGPVDTRTTSPIHRPAPAFIQLDTKLSIFETGIKVVDLLAPYRRGGKIGLFGGAGVGKTVLIMELINNIAKAHGGVSVFGGVGERTREGNDLYMEMKESGVINEENIAESKVALVYGQMNEPPGARMRVGLTALTMAEYFRDVNEQDVLLFIDNIFRFVQAGSEVSALLGRMPSAVGYQPTLSTEMGSLQERITSTKAGSITSIQAVYVPADDLTDPAPATTFAHLDATTVLSRGLAAKGIYPAVDPLDSTSTMLQPRIVGEEHYETAQRVKQTLQRYKELQDIIAILGLDELSEEDRLTVARARKIERFLSQPFFVAEVFTGSPGKYVGLAETIRGFQLILSGELDGLPEQAFYLVGNIDEATAKAMNLEMESNLK

SEQ ID NO: 2113 - protein, 631 aa, Glycine max
  unsure (1)..(631): unsure at all Xaa locations
MKSSLKKLRGLALHNHKHVSSKSIRPLGQLDELARATQDMQDMRDCYDTLLSAAAATASSAYEFSESLRDMGSCLLQKTALNDHGDETGKLLLMLGKIQFKLHKLIDHYRSHIFQTITIPSESLLNELRIVEEMKRQCDEKRDLYDYMVTRYREGGRSKGGKGETFSLQQLQTAHDEYDEEATLFVFRLKSLKQGQSRSLLTQAARHHAAQLCFFKKAVKSLETVEPHVKSVTEQQHIDYHFSGLEEEDGDEGDYGDDVGGGYDENDDGELSFDYGQIEQDQDVSTSRNSMELDQVELTLPRDSTAEAAKENLDNLVRNLFSFKVRAGSQSAPLFADNKPDASEKLRQMRPSLSRKFSXNVLPTPVDAKSSTSSGSNNPKPSKMQANLNEPTKNLWHSSPLEQKKQEKDIGDEFSGSIVRSAQSVLKESNSNTASMRLPPPLIDSLLSSNRDYISAYSKKIKRHAFSGPLTSNPGPTKPVSVESVQLFSGPLLPAPIPQPPSSSPKASPSASPTLMTSPKISELHELPRPPTSFPSNSRLLGLVGHSGPLVSRGQKVTANNLVASSAASPLPMPPQAMARSFSIPSSGARVAALHMPRTLESSHRSSISENIASPPLMPISLSSSRPSLDG

SEQ ID NO: 2114 - protein, 592 aa, Sulfolobus solfataricus
MDNGRIVRINGPLVVADNMRNAQMYEVVEVGEPRLIGEITRIEGDRAFIQVYEDTSGIKPNEPVYRTGAPLSIELGPGLIGKIFDGLQRPLDSIKELTKSPFIARGIKVPSIDRKTKWHFVPKVKKGDKVEGGSIIGIVNETPLVEHRILVPPYVHGTLKEVVAEGDYTVEDPIAIVDMNGDEVPVKLMQKWPVRIPRPFKEKLEPTEPLLTGTRVLDTIFPIAKGGTAAIPGPFGSGKTVTLQSLAKWSAAKIVIYVGCGERGNEMTDELRQFPSLKDPWTGRPLLERTILVANTSNMPVAAREASIYVGITMAEYFRDQGYDTLLVADSTSRWAEALRDLGGRMEEMPAEEGFPSYLPSRLAEYYERAGRVKTIGNPERFGSVTVASAVSPPGGDFTEPVTSQTLRFVKVFWPLDVSLAQARHYPAINWLQGFSAYVDLVANWWNTNVDPKWREMRDMMVRTLIREDELRQIVRLVGPESLAEKDKLILETARLIKEAFLKQNAYDDIDAFSSPQKQARIMRLIYLFNTYASKLVERGIPTKKIVDSMGQLLPEIIRSKAAIKNDELNRYDELERKLITVFENLEKEAGT

SEQ ID NO: 2115 - protein, 752 aa, Oryza sativa
  unsure (1)..(752): unsure at all Xaa locations
MSTSRVAASFARDIYRYVRTRPDRPRLAPPPLVRALRRPRLGGSRISTPPRAFRVPANADAHVLSVRRDGDLLDRLIDRLASARRGERQGIIRRIDIVGCYELLLNCSYVDRGCSHIWSWLAGHRAHTGGCRLMLLLRVGDVHYIISAQWRSPNPVQDQCGDKTDGDITESADRSIPCVALDHRYAFTTARRGRHRLTASTGEGVTGSYARTPPIVVASASRLLDTHRSQHAADTDRTGRTYVRPRLASGKCAALRRVATERNAPHMHRIRFVASALPVAAKIAIPWPCTARSRSRLILQHRARSRSRGGRKLVLLAIMNGGIGDALMQPQHVQVMSSSLPMVASTFVAEPAAAANKPRAAGLPPTPPQVFAAQRAAAAAGGDVCMEEMSTSRSAQGGGGGLPPRKAHRRSSSDVPFGYLAGXAPAPAAQGGGRVGPPRXXGAGGAAAADDLFNAYLNLEGLDGLNSSDXXRHDEGDSRGSSIKTNGADSSENESEECADDTRGGIRLWSADGGERREGVKRNAAGAATAPLARHARSLSMDSLIGKFNFTAGTXRRLRGTVSRWGRTXFSLEFGSGEFTPSEMKKIMADEKLAEMALADPKRVKRVLANRQSAARSKERKMRYIAELEQKVQILQSEATNLSAQLTMMQRDSAGLATQNNELKFRLHAMEQQAQLRDALNEALTTEVQRLKLATAELGDSCSSSSLAQQIQLNAQNQMXXQLQQQQATQIPFYQLQQSQQNGAAKNNESKE

SEQ ID NO: 2116 - protein, 224 aa, Streptococcus pneumoniae
MPKTLTEKLNAIKATGKGIFVPYIMAGDHEKGLDGLAETIHFLEDLGVSAIEVGIPFSDPVADGPVIEEAGLRSLAHGTSTQALVETLKTIETEIPLVIMTYFNPLFQYGVENFVKDLADTAVKGLIIPDLPHEHANFVEPFLADTDIALIPLVSLTTGIERQKELIEGAEGFIYAVAINGVTGKSGNYRADLDKHLAQLHQVADIPVLTGFGVSSQADLERFN

SEQ ID NO: 2117 - protein, 258 aa, Arabidopsis thaliana
MEGGASNEVAESSKKIGRGKIEIKRIENTTNRQVTFCKRRNGLLKKAYELSVLCDAEVALVIFSTRGRLYEYANNSVRGTIERYKKACSDAVNPPTITEANTQYYQQEASKLRRQIRDIQNLNRHILGESLGSLNFKELKNLESRLEKGISRVRSKKHEMLVAEIEYMQKREIELQNDNMYLRSKITERTGLQQQESSVIHQGTVYESGVTSSHQSGQYNRNYIAVNLLEPNQNSSNQDQPPLQLRDLIIYIYLDYVS

SEQ ID NO: 2118 - protein, 488 aa, Oryza sativa; identical to SEQ ID NO: 2015

SEQ ID NO: 2119 - protein, 482 aa, Eriolaena spectabilis
TLEQRNLGRISQIIGPVLDVAFPPGKMPNIYNALVVKGRDTVGQQINVTCEVQQLLGNNRVRAVAMSATDGLTRGMEVIDTGAPLSVPVGGATLGRIFNVLGEPVDNLGPVDTRTTSPIHKPAPAFIQLDTKLSIFETGIKVVDLLAPYRRGGKIGLFGGAGVGKTVLIMELINNIAKAHGGVSVFGGVGERTREGNDLYMEMKESGVINEQNLAESKVALVYGQMNEPPGARMRVGLTALAMAEYFRDVNEQDVLLFIDNIFRFVQAGSEVSALLGRMPSAVGYQPTLSTEMGTLQERITSTKEGSITSIQAVYVPADDLTDPAPATTFAHLDATTVLSRGLAAKGIYPAVDPLDSTSTMLQPRIVGEEHYETAQRVKQTLQRYKELQDIIAILGLDELSEEDRLTVARARKIERFLSQPFFVAEVFTGSPGKYVGLAETIRGFKLILSGELDGLPEQAFYLVGNIDEATAKATNLEMESN

SEQ ID NO: 2120 - protein, 480 aa, Hordeum vulgare subsp. vulgare
MNQSAIGSLVPRQAPGSYGLPFVSAIRDRLDFYYFQGEAKYFESRVEKHGSTVLRINVPPGPFMARDPRVVAVLDAKSFPVLFDVDKVEKKNLFTGTYMPSTSLTGGFRVCAYLDPSEPTHTKVKQLLFSLLASRKDAVIPAFRSHFSSLLATVESQLVLSGKSNFNTLNDFTSFEFIADTYFGVLPSASDLGTTGPAKAAKWLIFQLHPLVTFGLPMILEEPLLHTVLLPPIFVSGDYKALYKYFYAAATKALDMAESLGLNRDEACHNLLFATVFNSYGGLKVMLPGFLGRIAEAGEKFHQRLAAEVRTAVADAGGKVTIEALEKMELTKSAVWEALRLEPPVKFQYGRAKVDMNIESHDAVFAVQKGEMLFGYQPCATKDPRVFGSTAREFVGDRFVGEGSKLLQYVYWSNGRETESPSVDNKQCPGKNLVVLVGRLLVVELFLRYDTFTADVGVDLLGPKVEFTGVTKATSGPGAV

SEQ ID NO: 2121 - protein, 587 aa, Geobacillus stearothermophilus
MKRKTKIVCTIGPASESVDKLVQLMEAGMNVARLNFSHGDHEEHGRRIANIREAAKRTGRTVAILLDTKGPEIRTHNMENGAIELKEGSKLVISMSEVLGTPEKISVTYPSLIDDVSVGAKILLDDGLISLEVNAVDKQAGEIVTTVLNGGVLKNKKGVNVPGVKVNLPGITEKDRADILFGIRQGIDFIAASFVRRASDVLEIRELLEAHDALHIQIIAKIENEEGVANIDEILEAADGLMVARGDLGVEIPAEEVPLIQKLLIKKCNMLGKPVITATQMLDSMQRNPRPTRAEASDVANAIFDGTDAVMLSGETAAGQYPVEAVKTMHQIALRTEQALEHRDILSQRTKESQTTITDAIGQSVAHTALNLDVAAIVTPTVSGKTPQMVAKYRPKAPIIAVTSNEAVSRRLALVWGVYTKEAPHVNTTDEMLDVAVDAAVRSGLVKHGDLVVITAGVPVGETGSTNLMKVHVISDLLAKGQGIGRKSAFGKAVVAKTAEEARQKMVDGGILVTVSTDADMMPAIEKAAAIITEEGGLTSHAAVVGLSLGIPVIVGVENATTLFKDGQEITVDGGFGAVYRGHASVL

SEQ ID NO: 2122 - protein, 268 aa, Escherichia coli CFT073
MERYESLFAQLKERKEGAFVPFVTLGDPGIEQSLKIIDTLIEAGADALELGIPFSDPLADGPTIQNATLRAFAAGVTPAQCFEMLALIRQKHPTIPIGLLMYANLVFNKGIDEFYAECEKVGVDSVLVADVPVEESAPFRQAALRHNVAPIFICPPNADDDLLRQIASYGRGYTYLLSRAGVTGAENRAALPLNHLVAKLKEYNAAPPLQGFGISAPDQVKAAIDAGAAGAISGSAIVKIIEQHINEPEKMLAALKAFVQPMKAATRS

SEQ ID NO: 2123 - protein, 252 aa, Brassica napus
MAYQMELGGESSPQRKAGRGKIEIKRIENTTNRQVTFCKRRNGLLKKAYELSVLCDAEVALIVFSSRGRLYEYSNNSVKGTIERYKKAISDNSNTGSVAEINAQYYQQESAKLRQQIISIQNSNRQLMGETIGSMSPKELRNLEGRLDRSVNRIRSKKNELLFAEIDYMQKREVDLHNDNQLLRAKIAENERNNPSMSLMPGGSNYEQIMPPPQTQPQPFDSRNYFQVAALQPNNHHYSSAGREDQTALQLV

SEQ ID NO: 2124 - protein, 466 aa, Ricinus communis
MPPQAGSKWYDDDGKLKRTGTVWTASAHIITAVIGSGVLSLAWAVAQLGWVAGPAVMFLFSLVTYYTSTLLSACYRTGDPVNGKRNYTYMDAVRSNLGGAKFKICGYVQYVNLIGVAIGYTIASSISMMAVKRSNCFHKSEAKNPCHMKCQSLHDCILEVVESSSSQIPDFDQTMGGLSIVAAIMSFTYSTIGLGLGIAEVTKNGKAMGSMTGISIGTVTETQKIWRSFQALGDIAFAYSYSLILIEIQDTIRSPPAESKTMRKATLISVSVTTLFYMLCGCFGYAAFGDMSPGNLLTGFGFYNPYWLLDIANVAIVVHLVGAYQVYCQPLFAFVEKAAVQRFPDSEFILKDIKIPIPGCKPYNLNLFRMVWRTVFVIFTTVISMLLPFFNDIVGLLGALGFWPLTVYFPVEMYIAQKKIPKWSTRWLCLQILSAACLIITIAAAAGSIAGVIVDLKTVKPFQTTY

SEQ ID NO: 2125 - protein, 467 aa, Actinobacillus pleuropneumoniae serovar 1 str. 4074
MPQQFNGEQVMATGKIVQIIGAVIDVEFPQDAVPKVYDALKVESGLTLEVQQQLGGGLVRCIALGTSDGLKRGLKVENTGNPIQVPVGTKTLGRIMNVLGEPIDEKGPIGEEARWDIHRAAPSYEEQSNSTELLETGIKVIDLICPFAKGGKVGLFGGAGVGKTVNMMELIRNIAIEHSGYSVFAGVGERTREGNDFYHEMTDSNVLDKVSLVYGQMNEPPGNRLRVALTGLTMAEKFRDEGRDVLFFVDNIYRYTLAGTEVSALLGRMPSAVGYQPTLAEEMGVLQERITSTKTGSITSVQAVYVPADDLTDPSPATTFAHLDSTVVLSRNIASLGIYPAVDPLDSTSRQLDPLVVGEEHYNVARGVQGTLQRYKELKDIIAILGMDELSEDDKLVVARARKIERFLSQPFFVAEVFTGSPGKYVSLKDTIRGFKGILEGEFDHIPEQAFYMAGSIDEVVERASKM

SEQ ID NO: 2126 - protein, 578 aa, Methanosarcina acetivorans C2A
MEVKGEIYRVAGPVVTAIGLDAKMYDLCKVGNEGLMGEVIQIVGGKTIIQVYEETGGVKPGEPCVTTGMSLAVELGPGLLSSIYDGVQRPLHVLLEKTGGFIQRGVTADGLDHEKLWEFKPVAKKGDFVKGGEVLGVVQETVNLEHKVMMPPDKSGTVADIKSGNFTVLETVCTLTDGTELQMMHRWPVRRPRPVKRKLTPEKPLVTGQRILDGLFPVAKGGTAAIPGPFGSGKTVTQQQLSKWSDTEIVVYVGCGERGNEMADVLWDFPELEDPQTGRPLMERTILVANTSNMPVAAREASVYTGMTLAEYFRDMGYNVSLMADSTSRWAEAMREISSRLEEMPGEEGYPAYLSARLAEFYERAGVAETLCGEKGSITAIGAVSPPGGDFSEPVTQNTLRIVKVFWALDAKLSQRRHFPAINWLNSYSLYKEDLNDWFTENVAPDYVAMREKAMDMLQTESELQEIVQLVGSDALPEEQQLLLEITRMIREIYLQQNAFHPIDTYSPFAKQYKIMQAIMKYGDAAMDALKSGVPASEIIKMESKDELPKVKFEEDFDGSLSAVLAKMDKEFAALGGR

SEQ ID NO: 2127 - protein, 503 aa, Triticum aestivum; identical to SEQ ID NO: 732

SEQ ID NO: 2128 - protein, 318 aa, Glycine max
MADQSEHSKTALPPEDQDRPVRVYADGIYDLFHFGHARSLEQAKKSFPNTYLLVGCCNDQVTHKYKGKTVMTEAERYESLRHCKWVDEVIPDAPWVINQEFLDKHNIDYVAHDSLPYADASGAANDVYEFVKSVGRFKETKRTEGISTSDVIMRIVKDYNQYVLRNLDRGYSRNELGVSYVKEKRLRVNRRLKTLQEKVKEHQEKVGEKIQIVAKTAGMHRNEWVENADRWVAGFLEMFEEGCHKMGTAIRDRIQERLRGQQSRDGTLRLQNGEDDKDDDDEEYYYDDEEDSDEEYFEEYYDDDELNPQNNGKDEKKE

SEQ ID NO: 2129 - protein, 490 aa, Evolvulus glomeratus
MRINPTTSSSQVSTIEKKNLGRIVQIIGPVLDVAFPPGKMPNIYNALVVQGRDNEQMNVACEVQQLLGNNRVRAVAMSDTDGLMRGMEVIDTGTPISVPVGGATLGRIFNVLGKPVDNLGPVDTKTTSPIHRSAPAFIQLDTKLSIFETGIKVVDLLAPYRRGGKIGLFGGAGVGKTVLIMELINNIAKAHGGVSVFGGVGERTREGNDLYMEMKESGVINEENIAESKVALVYGQMNEPPGARMRVGLTALTMAEYFRDVNEQDVLLFIDNIFRFVQAGSEVSALLGRMPSAVGYQPTLSTEMGSLQERITSTKEGSITSIQAVYVPADDLTDPAPATTFAHLDATTVLSRGLAAKGIYPAVDPLDSTSTMLQPRIVGEEHYETAQRVKQTLQRYKELQDIIAILGLDELSEEDRLTVARARKIERFLSQPFFVAEVFTGSPGKYVGLAETIRGFQLILSGELDGLPEQAFYLVGNIDEATAKAMNLKT

SEQ ID NO: 2130 - protein, 1070 aa, Saccharomyces exiguus
LEDHNESEYGSIYSVSGPVIVAENMIGCAMYELVKVGHDNLVGEVIRIDGDKATIQVYEETAGATVGDPVLRTGKPLSVELGPGLMETIYDGIQRPLKTIKDISQSIYIPRGIDAPALSRDIKWNFTPGKYVVGDHISGGDIFGSIFENSLLDNHKILLPPRARGTITWIAPAGEYTVDEKVLEVEFDGVKSDYSMYHTWPVRVPRPVAEKLSADYPLLTGQRVLDALFPCVQGGTTCIPGAFGCGKTVISQSLSKYSNSDAIIYVGCFAKGTQVMMADGTDKSIEDIQLGENVMGKDGTPRTVISLPRGKETMYEVCHSSIKGTTNETLMNYVCSGNHKIVMQTPQQIGITEHAIDGKTYTSVSYFALRDSQDGYPIVKKLTKSFEHQQNGGKEQTLITVNNFVASLKSEPINWDVEAKHYESLGHYVKKCSYQLINPVFHQSGKLAQEIASLNYSKDKAPLLAWLIGFWVGNGAMRHSQFVIDSQDIELVNRIQEIATLLNLSATTACYYSGSVDDQDKLAKLNTATGEGFEDDLQSNPTAKELADMDILSESKTATLPTAFGVEKIDELIISLGEGRGNGNVFAQVIGSFGIDLADKDTLVSKIAHELAGDAFEVREQFVAGLVDATGYVRKDVYDHASEATVSIESKSTVLGLVKIARSLGIKIVVTSNDYQDPEDHDHGHDHGSCGHDEVATGYTAVMTGDALTNSMRFCAIGRNRVTAKQFMRQAIPFYFSLEKKSEDDYYGITVPDNTDKQYLLSSMALVHNCGERGNEMAEVLMEFPELFTEINGRKEPIMKRTTLVANTSNMPVAAREASIYTGITLAEYFRDQGKNVSMIADSSSRWAEALREISGRLGEMPADQGFPAYLGAKLASFYERAGKAVALGSPDRIGSVSIVAAVSPAGGDFSDPVTTATLGITQVFWGLDKKLAQRKHFPSINTSVSYSKYTNVLDKFYDQNYPEFPTLRNRMKEILSNAEELEQVVQLVGKSALSDSDKITLDVASLIKEDFLQQNGYSTYDAFCPIWKTFDMMKAFIAYHDEAQKSVANGANWSKLSEATSDVKHQVSS

SEQ ID NO: 2131 - protein, 498 aa, Montinia caryophyllacea
  unsure (1)..(498): unsure at all Xaa locations
XXXXXXXXXXXXXXXEXKTLGRIVQIIGPVLDVAFPPGKMPNIYNALVVKGRDSAGQPINVTCEVQQLLGNNRVRAVAMSATDGLTRGMEVIDMGAAISVPVGGATLGRIFNVLGEPVDNLGPVDTSTTSPIHRSAPAFIQLDTKLAIFETGIKVVDLLAPYRRGGKIGLFGGAGVGKTVLIMELINNIAKAHGGVSVFGGVGERTREGNDLYMEMKESGVINEENIAESKVALVYGQMNEPPGARMRVGLTALTMAEYFRDVNEQDVLLFIDNIFRFVQAGSEVSALLGRMPSAVGYQPTLSTEMGSLQERITSTKEGSITSIQAVYVPADDLTDPAPATTFAHLDATTVLSRGLAAKGIYPAVDPLDSTSTMLQPRIVGEEHYETAQRVKETLQRYKELQDIIAILGLDELSEEDRLTVARARKIERFLSQPFFVAEVFTGSPGKYVGLAETIRGFQLILSGELDSFPEQAFYLVGNIDEATAKAMNLEMESNLKK

SEQ ID NO: 2132 - protein, 490 aa, Merremia aegyptia
  unsure (1)..(490): unsure at all Xaa locations
MRINPTTSGSEVSAVDKKNLGRIVKIIGPVLDVAFPPGKMPNIYNALVVQGRDNEQTNVTCEVQQLLGNNRVRAVAMSDTDGLMRGMEVIDTGAPISVPVGGSTLGRIFNVLGQPVDNLGPVDTNTTSPIHRSAPAFIQLDTKLSIFETGIKVVDLLAPYRRGGKIGLFGGAGVGKTVLIMELINNIAKAHGGVSVFGGVGERTREGNDLYLEMKESGVINEENIAESKVALVYGQMNEPPGARMRVGLTALTMAEYFRDVNEQDVLLFIDNIFRFVQAGSEVSALLGRMPSAVGYQPTLSTEMGSLQERITSTKEGSITSIQAVYVPADDLTDPAPATTFAHLDATTVLSRGLAAKGIYPAVDPLDSTSTMLQPRIVGEEHYEIAQRVKQTLQRYKELQDIIAILGLDELSEEDRLTVARARKIERFLSQPFFVAEVFTGSPGKYVGLAETIRGFQLILSGELDGLPEQAFYLVGNIDEATAKAMNXXX

SEQ ID NO: 2133 - protein, 258 aa, Leuconostoc mesenteroides subsp. mesenteroides ATCC 8293
MTRISQALENKNAFIGFAVAGYPDFEKSAKYIVDMAEAGADLIEIGIAFSDPSADGPTIMNADQEVLENGSTTADVFNLVAEVRKHTDVPLVFLTYTNPVFKYGYEKFLSKMQSLDIQGVIMPDMPMEEQDEFLELVHQYGRDFIQLVTLQSGNRLPKIVERASGFIYVVSSLGITGSRSKLSNEADEIVTKIKRLTDLPVAVGFGITTYDQAKQFESADAIIVGSALVKIIEDHPEDATSYLTDFIKNMKGARHATN

SEQ ID NO: 2134 - protein, 456 aa, Fuchsia procumbens
  unsure (1)..(456): unsure at all Xaa locations
FPPGKMPNINNALVVXGRDTVGQEINVACEVQQLLGNNRVRALAMSATDGLTRGMEVIDTGAPLSVPVGGATLGRIFNVLGEPVDELGPVDTRTTSPIHRSAPAFIQLDTKLSIFETGIKVVDLLAPYRRGGKIGLFGGAGVGKTVLIMELINNIAKAHGGVSVFGGVGERTREGNDLYMEMKESGVINEQNIAESKVALVYGQMNEPPGARMRVGLTALTMAEYFRDVNEQDVLLFIDNIFRFVQAGSEVSALLGRMPSAVGYQPTLSTEMGSLQERITSTKEGSITSIQAVYVPADDLTDPAPATTFAHLDATTVLSRGLAAKGIYPAVDPLDSTSTMLQPRIVGEEHYETAQRVKETLQRYKELQDIIAILGLDELSEEDRLTVARARKIERFLSQPFFVAEVFTGSPGKYVGLVETIRGFKLILSGELDGLPEQAFYLVGNIDEATAKAANL

SEQ ID NO: 2135 - protein, 489 aa, Staphylea trifolia
  unsure (1)..(489): unsure at all Xaa locations
GXGXXTLENKNSGRIAQIIGPVLDVAFPPGKMPNIYNALVVXGRDTVGQQINVTCEVQQLLGNNRVRAVAMSATEGLMRGMEVIDTGAPLSVPVGGATLGRIFNVLGEPVDNLGPVDTRTTSPIHRSAPAFIQLDTKLSIFETGIKVVDLLAPYRRGGKIGLFGGAGVGKTVLIMELINNIAKAHGGVSVFGGVGERTREGNDLYMEMKESGVINEQNIAESKVALVYGQMNEPPGARMRVGLTALTMAEYFRDVNEQDVLLFIDNIFRFVQAGSEVSALLGRMPSAVGYQPTLSTEMGSLQERITSTKEGSITSIQAVYVPADDLTDPAPATTFAHLDATTVLSRGLAAKGIYPAVDPLDSTSTMLQPRIVGEEHYETAQRVKQTLQRYKELQDIIAILGLDELSEDDRLTVARARKIERFLSQPFFVAEVFTGSPGKYVGLAETIRGFKLILSGELDGLPEQAFYLVGNIDEATAKATNLEMESBLK

SEQ ID NO: 2136 - protein, 486 aa, Reevesia thyrsoidea
  unsure (1)..(486): unsure at all Xaa locations
GVPALEKXNLGRXVQXIGPVLDVAFPPGKMPNIYNALVVKGRDTVGQQINVTCEVQQLLGNNRVRAVAMSATDGLMRGMEVIDTGAPLSVPVGGATLGRIFNVLGEPVDNLGPVDTRTTSPIHKPAPAFIQLDTKLSIFETGIKVVDLLAPYRRGGKIGLFGGAGVGKTVLIMELINNIAKAHGGVSVFGGVGERTREGNDLYMEMKESGVINEQNLAESKVALVYGQMNEPPGARMRVGLTALTMAEYFRDVNEQDVLLFIDNIFRFVQAGSEVSALLGRMPSAVGYQPTLSTEMGSLQERITSTKEGSITSIQAVYVPADDLTDPAPATTFAHLDATTVLSRGLAAKGIYPAVDPLDSTSTMLQPRIVGEEHYETAQRVKQTLQRYKELQDIIAILGLDELSEEDRLTVARARKIERFLSQPFFVAEVFTGSPGKYVGLAETIRGFKLILSGELDGLPEQAFYLVGNIDEATAXXTNLEMESKL

SEQ ID NO: 2137 - protein, 493 aa, Arabidopsis thaliana
MGETAAANNHRHHHHHGHQVFDVASHDFVPPQPAFKCFDDDGRLKRTGTVWTASAHIITAVIGSGVLSLAWAIAQLGWIAGPAVMLLFSLVTLYSSTLLSDCYRTGDAVSGKRNYTYMDAVRSILGGFKFKICGLIQYLNLFGIAIGYTIAASISMMAIKRSNCFHKSGGKDPCHMSSNPYMIVFGVAEILLSQVPDFDQIWWISIVAAVMSFTYSAIGLALGIVQVAANGVFKGSLTGISIGTVTQTQKIWRTFQALGDIAFAYSYSVVLIEIQDTVRSPPAESKTMKKATKISIAVTTIFYMLCGSMGYAAFGDAAPGNLLTGFGFYNPFWLLDIANAAIVVHLVGAYQVFAQPIFAFIEKSVAERYPDNDFLSKEFEIRIPGFKSPYKVNVFRMVYRSGFVVTTTVISMLMPFFNDVVGILGALGFWPLTVYFPVEMYIKQRKVEKWSTRWVCLQMLSVACLVISVVAGVGSIAGVMLDLKVYKPFKSTY

SEQ ID NO: 2138 - protein, 1165 aa, Arabidopsis thaliana
MSKFGELNPAFSGAGRSSSNNNPDASFNSAPFPRSSSGLSKPRFSKVRRQVKSQNLKPSGTSDSLPGQSFNPFHFRGSFSGDPTPSEIGFGRSSNEGFVFGGSSHVDKLQSDEKIGIRVMEEMERLKIESEGKASRLPEDMQNLNSSFSFGVKKGSNNSVFATVELPTLLSNKLIIDSSSRSTGHVIQESMEKLNISERGTDQKQNNNVKSKVSMDYVGEKILSDDLSRKLSVGSMTTDGNHSGDSFQGSVNEKKVHDFNSSCPMNYSFVGTEPSQNLNARNVHDVSSTVNTSDFNFVSNQDSVKTGFMEFKTPNSKVNPFSSLDQKLGFNAKKDSVGATTRARRKGGKQPVKVQLNIGREFAFAESAIPNGSNEAPEAYSPMDISPYEETEVCREFSADIPPTAPNYLFDAELVAATERMEINEGDEVNNYQAEEFNTGNCADHEDLAGDSISGAETESFKSAAEEMETSSETFATASESEVTSRYKSDRKENDDHSLSNTDAASSSFTFSASSFSGVQGPLSTSKRINRKKNPIKLGQDPYILIPNATLPLKSSQHSPLTGVQSHFSTGKPSERDPLTRLHKPINNSVMEKARIEKDVSNAAQEACEKWRLRGNNAYKIGDLSRAEESYTQGIDSVPRIETSRNCLRALMLCYSNRAATRMALGRMREAIADCTMASSIDSNFLKVQVRAANCYLSLGEIEDASRYFKKCLQSGSDICVDRKIIVEASEGLQKAQRVSECMHEAGRRLQLRTLTDAEKALEILEDSLLISTYSEKLLTMKGEALLMLEKYDAAIKLCEQTVDLAGKNSPPDSHDTPKDINFRIWQCHLMLKSSFYMGKLEEAIASLEKQEQLLSATKREGNKTLESSIPLAATIRELLRLKAAGNEAFQSGRHTEAVEHYTAALACNVESRPFTAVCFCNRAAAYKALGQFSDAIADCSLAIALDQNYSKAISRRATLFEMIRDYGQAASDMERYVNILTKQMEEKTSGTLDRSTSMSNDIRQARIRLSELEEKSRKENSLDMYLVLGVVPSCSASDIRKAYRKAALKHHPDKAGQSLTRNETKDERLWKEIGEEVRKDTDKLFKMIGEAYAVLSDPAKRSQYDLEEEMHNSQKRRDGSSTSGADTDNYPFHSSRRNWREGWSSRKDPSTPRWFDPNRSNRYP

SEQ ID NO: 2139 - protein, 242 aa, Shigella sonnei
LKERKEGAFVPFVTLGDPGIEQSLKIIDTLIEAGADALELGIPFSDPLADGPTIQNATLRAFAAGVTPAQCFEMLALIRQKHPTIPIGLLMYANLVFNKGIDEFYAQCEKVGVDSVLVADVPIEESAPFRQAALRHNVAPIFICPPNADDDLLRQIASYGRGYTYLLSRAGVTGAENRAALPLNHLVAKLKEYNAAPPLQGFGISTPDQVKAAIGAGAAGAIFGLAIVKIIEQHINEPEKML

SEQ ID NO: 2140 - protein, 496 aa, Costus malortieanus
MRTNPTTSSPAVSTLEEQNLGRIAQIIGPVLDVVFPPGKMPNIYNALVVKGRDTVGQQINVTCEVQQLLGNNRVRAVAMSATDGLTRGMGVIDTGAPLSVPVGGATLGRIFNVLGEPVDNLGPVDTSTTSPIHRPAPAFIQLDTKFSIFETGIKVVDLLAPYRRGGKIGLFGGAGVGKTVLIMELINNIAKAHGGVSVFGGVGERTREGNDLYMEMKESGVINEKNIAESKVALVYGQMNEPPGARMRVGLTALTMAEYFRDVNEQDVLLFIDNIFRFVQAGSEVSALLGRMPSAVGYQPTLSTEMGSLQERITSTKEGSITSIQAVYVPADDLTDPAPATTFAHLDATTVLSRGLAAKGIYPAVDPLDSTSTMLQPRIVGEEHYETAQRVKQTSQRYKELQDIIAILGLDELSEEDRLTVARARKIERFLSQPFFVAEVFTGSPGKYVGLAETIRGFQLILSGELDSLPEQAFYLVGNIDEATAKAMNLEGESKL

SEQ ID NO: 2141 - protein, 268 aa, Escherichia coli K12
MERYESLFAQLKERKEGAFVPFVTLGDPGIEQSLKIIDTLIEAGADALELGIPFSDPLADGPTIQNATLRAFAAGVTPAQCFEMLALIRQKHPTIPIGLLMYANLVFNKGIDEFYAQCEKVGVDSVLVADVPVEESAPFRQAALRHNVAPIFICPPNADDDLLRQIASYGRGYTYLLSRAGVTGAENRAALPLNHLVAKLKEYNAAPPLQGFGISAPDQVKAAIDAGAAGAISGSAIVKIIEQHINEPEKMLAALKVFVQPMKAATRS

SEQ ID NO: 2142 - protein, 448 aa, Borrelia burgdorferi
MNKLEEHYIVPKDVVAELDKYIIGQDEAKKLVSIALVNRYIRSRLPKEIKDEVMPKNIIMIGSTGIGKTEIARRLSKLIKAPFIKVEATKYTEVGYVGRDVESMVRDLMSIAVNMVKEEMYSTVRDDALVRTEERIVDSLFKGSSNSENMDPNEIKAEEKVKEKLRKKLRAGELDDTTIEIQISSKMPFSTIEIFTGGNFEEIDMGIGGLLGNIFDRKKKRELKIKKAKEIILAEELEKLVDHENISDIAKSKVENMGIIFIDEIDKIAAKNRSGNDVSREGVQRDILPIIEGSKVNTKYGIVDTSHILFIAAGAFNLAKPSDLIPELQGRFPIKVELKSLSIDDLKKILKQTKNSLIKQYVAMFKVYDLDLKFSEEAIDRIAELTFNMNLESENLGARRLHGVMEIVLADLFFEVPGSKLKKFEINLDYVNKKIQINEQKDLNYYII

SEQ ID NO: 2143 - protein, 161 aa, Triticum aestivum
LLSCLPAVWVLAAAAGRSPGCATRCGEIDVPYPFGLDPQCAIHAGFWLNCTTVDGATKLLDKNSEVTKISVEDGKAWFKNFISRQCYNQSSGDMFENNAWVDYTGEPYVLSAEDNKIIVLGCNSMAYMQSDSYIIGCMSTCDDQLKNGSCSGTAGCCKRSS

SEQ ID NO: 2144 - protein, 511 aa, Arabidopsis thaliana
MAFTSMVSTVPVLFFFFTLLLISANSSSLSHNIKVQEQDKDPFVGFNIGTDVSNLLSPTELVKFLQAQKVNHVRLYDADPELLKALAKTKVRVIISVPNNQLLAIGSSNSTAASWIGRNVVAYYPETLITAISVGDEVLTTVPSSAPLLLPAIESLYNALVASNLHTQIKVSTPHAASIMLDTFPPSQAYFNQTWHSIMVPLLQFLSKTGSPLMMNLYPYYVYMQNKGVVPLDNCLFEPLTPSKEMVDPNTLLHYTNVLDAMVDAAYVSMKNLNVSDVAVLVTESGWPSKGDSKEPYATIDNADTYNSNLIKHVFDRTGTPLHPEMTSSVYIYELFNEDLRAPPVSEASWGLFYGNSTPVYLLHVSGSGTFLANDTTNQTYCIAMDGVDAKTLQAALDWACGPGRSNCSEIQPGESCYQPNNVKGHASFAFNSYYQKEGRASGSCDFKGVAMITTTDPSHGSCIFPGSKKVGNRTQTVVNSTEVAAGEATSRSLSRGFCVTIMILVTFSIL

SEQ ID NO: 2145 - protein, 304 aa, Oryza sativa
  unsure (1)..(304): unsure at all Xaa locations
MSESEVSVINQLEEEETRLELPPGFRFHPTDEEVVTHYLTRKAQDRSFSCVVIADVNLNNCEPWDLPTIAKMGEKEWFFFCHKDRKYPTGMRTNRATASGYWKATGKDKEIFRGRGLLVGMKKTLVFYMGRAPRGEKTPWVMHEYRLDGKLPPNLPRSAKEEWAVCRVFNKDLAAKIAQMPPPPFPRNDSFDLDLDDFLHLDADLPPLIDDPFASTSTLKXGATSAGQPDAQPLRPXATSPSRRQRPIITTAPAPWRTRRFGGSARRRRRRRASPAPTLTWIRWWTSCSPSRTPSRTTPTYGRP

SEQ ID NO: 2146 - protein, 1104 aa, Populus tremuloides
GRYISYSRDDLDSELGSSDFMNYTVHLPPTPDNQPMDPSISQKVEEQYVSNSLFTGGFNSVTRAHLMDKVIESEASHPQMAGAKGSSCAIPGCDAKVMSDERGVDILPCECDFKICRDCFIDAVKIGGGICPGCKEPYKNTELYEVDVDSGRPLPLPPPGTVSKMERRLSLMKSTKSALMRSQTGDFDHNRWLFETRGTYGYGNAIWPSDGGFGNGNDEEVGGPKELMNKPWRPLTRKLKIPAAVISPYRLLIFVRIVILALFLQWRIVHPNNDAIWLWGMSVVCEVWFAFSWLLDQLPKLCPINRATDLNVLKDKFETPSPSNPTGKSDLPGIDVFVSTADPEKEPPLVTANTILSILAADYPVEKLSCYVSDDGGALLTFEAMAEAASFANVWVPFCRKHDIEPRNPESYFSLKRDPYKNKVKQDFVKDRRRVKREYDEFKVRINSLPDSIRRRSDAYHAREEIKAMKLQRQHKDDEPVESVKIPKATWMADGTHWPGTWLNPAPEHSKGDHAGIIQVMLKPPSDEPLLGTSDETKIMDFTDVDIRLPLLVYVSREKRPGYDHNKKAGAMNALVRASAIMSNGPFILNLDCDHYIYNSQAMREGMCFMMDRGGDRLCYVQFPQRFEGIDPSDRYANHNTVFFDVNMRALDGLMGPVYVGTGCLFRRIALYGFDPPRAKEDHPDCCSCCFARRKKHSSAANTPEENRALRMGDYDDEEMNLSLLPKKFGNSTFLIDSIPVTEFQGRPLADHPAVKNGRPPGALTIPRELLDASTVAEAISVISCWYEDKTEWGNRVGWIYGSVTEDVVTGYRMHNRGWKSVYCVTKRDAFRGTAPINLTDRLHQVLRWATGSVEIFFPCNNALLASRRMQFLQRIAYLNVGIYPFTSIFLIVYCFLPALSLFSGQFIVQTLNVTFLAYLLIITLTLCLLAVLEIKWSGIDLEEWWRNEQFWLIGGTSAHLAAVLQGLLKVVAGIEISFTLTSKSGGDDVDDEFADLYVVKWTSLMIPPITIMMVNLIAIAVGFSRTIYSVIPQWSRLLGGVFFSFWVLAHLYPFAKGLMGRRGRTPTIVFVWSGLIAITISLLWVAINPPSGTTQIGGSFQFP

SEQ ID NO: 2147 - protein, 596 aa, Prochlorococcus marinus subsp. pastoris str. CCMP1378
MSNIDLKRRTKIVATIGPATQSEEIITDLIKAGVTTFRLNFSHGDHKDHQERIQTIRKVSEKLDLDIGILQDLQGPKIRLGRFKDGPVKVKKGDKFSLTSNEVECTKSIANVTYNKLAQEVTSGKRILLDDGKIEMIVEKVDIGNNLLECKVTVGGVLSNNKGVNFPDVQLSVKALTDKDIEDLEFGLTAGVDWIALSFVRNPSDINEIKNLINKNGHSIPVVAKIEKFEAIDQIDSILPLCDGVMVARGDLGVEMPAEEVPLLQKELIRKANTLGIPIITATQMLDSMASNPRPTRAEVSDVANAILDGTDAVMLSNETAVGDYPVEAVETMATIARRIERDYPLKAIESHLPSTIPNAISAAVSNIARQLDAGAIIPLTKSGSTARNVSKFRPPTPILATTTERCVARRLQLVWGVTPLLVKNDDRTAKTFSIAMQIAQELGILKQGDLVVQTAGTLTGISGSTDLIKVGLVRKVVTRGISVGEIGVTGKARNIKTNLDLSLISPGEILFVPKNILMDLPFTKIITGIVTDENIDECYKVFKKNNIKISTICNLSAIDNLVSNGDLITLQLNEGVVYMGQIEDDEDALDKYKYV

SEQ ID NO: 2148 - protein, 488 aa, Oryza sativa; identical to SEQ ID NO: 1504

SEQ ID NO: 2149 - protein, 456 aa, Berrya javanica
  unsure (1)..(456): unsure at all Xaa locations
IGPVLDVAFPPGKMPNIYNAXVVXGQDTXGQQINVTCEVQQLLGNNRVRAVAMSATDGLMRGMEVTDTGAPLSVPVGGATLGRIFNVLGEPVDNLGPVDTRTTSPIHKPAPAFIQLDTKLSIFETGIKVVDLLAPYRRGGKIGLFGGAGVGKTVLIMELINNIAKAHGGVSVFGGVGERTREGNDLYMEMKESGVINEQNLAESKVALVYGQMNEPPGARMRVGLTALTMAEYFRDVNEQDVLLFIDNIFRFVQAGSEVSALLGRMPSAVGYQPTLSTEMGSLQERITSTKEGSITSIQAVYVPADDLTDPAPATTFAHLDATTVLSRGLAAKGIYPAVDPLDSTSTMLQPRIVGEEHYETAQRVKQTLQRYKELQDIIAILGLDELSEEDRLTVARARKIERFLSQPFFVAEVFTGSPGKYVGLAETIRGFKLILSGELDGLPEQAFYLVGNIDE

SEQ ID NO: 2150 - protein, 908 aa, Oryza sativa (japonica cultivar-group)
IKRLHLLLTVKESAMDVPTNLDARRRISFFANSLFMDMPSAPKVRHMLPFSVLTPYYKEDVLFSSQALEDQNEDGVSILFYLQKIYPDEWKHFLQRVDCNTEEELRETEQLEDELRLWASYRGQTLTRTVRGMMYYRQALVLQAFLDMARDEDLREGFRAADLLNDESPLLTQCKAIADMKFTYVVSCQQYGIQKRSGDHRAQDILRLMTTYPSLRVAYIDEVEEPSKDRNKKIEKVYYSALVKAAVTKPDDPGQKLDQDIYRIKLPGNAMLGEGKPENQNHAIIFTRGEGLQTIDMNQEHYMEETLKMRNLLQEFLKKHDGVRYPSILGVREHIFTGSVSSLAWFMSNQETSFVTIGQRVLANPLRVRFHYGHPDIFDRLFHLTRGGVSKASKIINLSEDIFAGFNSTLREGNVTHHEYMQVGKGRDVGLNQISLFEAKIANGNGEQTLSRDVYRLGHRFDFFRMLSCYYTTIGFYFSTMMTVWTVYVFLYGRLYLVLSGLDEALATGKRFIHNEPLQVALASQSFVQLGFLMALPMMMEIGLERGFRTALSDFVLMQLQLASVFFTFSLGTKTHYYGTTLLHGGAEYRATGRGFVVFHAKFAENYRLYSRSHFVKGIELLILLIVYEIFGQSYRGAIAYIFITFSMWFMVVTWLFAPFLFNPSGFEWQKIVDDWTDWNKWISNRGGIGVPPEKSWESWWEKEQEPIKYSGKRGIVLEIVLALRFFIYQYGLVYHLNITKHTKSVLVYCLSWVVIFVILLVMKTVSVGRRKFSADFQLVFRLIKGLIFITFISIIIILIAIPHMTVQDIFVCILAFMPTGWGLLLVAQAIKPVIVRIGLWGSIKALARGYEIIMGLLLFTPIAFLAWFPFVSEFQTRMLFNQAFSRGLQISRILGGHKKDRATRNKE

SEQ ID NO: 2151 - protein, 534 aa, Oryza sativa (japonica cultivar-group); identical to SEQ ID NO: 491

SEQ ID NO: 2152 - protein, 490 aa, Porana paniculata
  unsure (1)..(490): unsure at all Xaa locations
MRINPTTSGSGVSTVEKKNLGRIVQIIGPVLDVAFPPGKMPYIYNALVVQGRDNEQTKVTCEVQQLLGNNRVRAVAMSDTDGLMRGLEVIDTGAPISVPVGGSTLGRIFNVLGKPVDHLGPVDTNTTSHIHRSAPAFIQLDTKLSIFETGIKVVDLLAPYRRGGKIGLFGGAGVGKTVLIMELINNIAKAHGGVSVFGGVGERTREGNDLYMEMKESGVINEETIAESKVALVYGQMNEPPGARMRVGLTALTMAEYFRDVNEQDVLLFIDNIFRFVQAGSEVSALLGRMPSAVGYQPTLSTEMGSLQERITSTKEGSITSIQAVYVPADDLTDPAPATTFAHLDATTVLSRGLAAKGIYPAVDPLDSTSTMLQPRIVGEEHYEIAQRVKQTLQRYKELQDIIAILGLDELSEEDRLTVARARKIERFLSQPFFVAEVFTGSPGKYVGLAEAIRGFQLILSGELDGLPEQAFYLVGNIDEATAKAMNXKX

SEQ ID NO: 2153 - protein, 488 aa, Theobroma cacao
SGVSTLEKRNLGRISQIIGPVLDVAFPPGKMPNIYNALVVKGRDTVGQQINVTCEVQQLLGNNRVRAVAMSATDGLTRGMEVIDTGAPLSVPVGGATLGRIFNVLGEPVDNLGPVDTRTTSPIHKPAPAFIQLDTKLSIFETGIKVVDLLAPYRRGGKIGLFGGAGVGKTVLIMELINNIAKAHGGVSVFGGVGERTREGNDLYMEMKESGVINEQNLAESKVALVYGQMNEPPGARMRVGLTALTMAEYFRDVNEQDVLLFIDNIFRFVQAGSEVSALLGRMPSAVGYQPTLSTEMGTLQERITSTKEGSITSIQAVYVPADDLTDPAPATTFAHLDATTVLSRGLAAKGIYPAVDPLDSTSTMLQPRIVGEEHYETAQRVKQTLQRYKELQDIIAILGLDELSEEDRLTVARARKIERFLSQPFFVAEVFTGSPGKYVGLAETIRGFKLILSGELDGLPEQAFYLVGNIDEATAKATNLEMESKLK

SEQ ID NO: 2154 - protein, 402 aa, Lychnothamnus barbatus
LLGDNKVRAVAMSATDGLMRGMEVIDTGAPLSVPVGETTLGRIFNVLGEPVDNLGPVDTTITFPIHRSAPAFTQLDTKLSIFETGIKVVDLLAPYRRGGKIGLFGGAGVGKTVLIMELINNIAKAHGGVSVFGGVGERTREGNDLYMEMKESKVINQENISESKVALVYGQMNEPPGARMRVGLTALTMAEYFRDVNKQDVLLFIDNIFRFVQAGSEVSALLGRMPSAVGYQPTLSTEMGSLQERITSTKEGSITSIQAVYVPADDLTDPAPATTFAHLDATTVLSRNLAAKGIYPAVDPLDSTSTMLQPWIVGEEHYETAQGVKETLQRYKELQDIIAILGLDELSEEDRLIVARARKIERFLSQPFFVAEVFTGSPGKYVSLIDTIKGFQMILSGELDHL

SEQ ID NO: 2155 - protein, 122 aa, Pinus pinaster
QDWVKENVAPFVPATNILAISVGSEILSTGNKVLISQLVPAMQNLHTALVGASLDKQIKVSTPHSLGILSASEPPSIGRFRRGYDRVILKPLLNFLRTTGAPFMINPYPYFGYTDKTLNYAL

SEQ ID NO: 2156 - protein, 253 aa, Chlamydia trachomatis
MSKLTQVFKQTKPCIGYLTAGDGGTSYTIEAAKALIQGGVDILELGFPFSDPVADNPEIQVSHDRALAENLTSETLLEIVEGIRAFNQEVPLILYSYYNPLLQRDLDYLRRLKDAGINGVCVIDLPAPLSHGEKSPFFEDLLAVGLDPILLISAGTTPERMSLIQEYARGFLYYIPCQATRDSEVGIKEEFRKVREHFDLPIVDRRDICDKKEAAHVLNYSDGFIVKTAFVHQTTMDSSVETLTALAQTVIPG

SEQ ID NO: 2157 - protein, 472 aa, Lactobacillus plantarum WCFS1
MEEINKTPKQIVAALDNYVIGQNQAKKAVAIALRNRYRRMELSAEMQEEITPKNMLMIGPTGVGKTEIARRLAKIVHAPFVKVEATKFTEVGYVGRDVESMVRDLVDVAIEMEKQQAYSGVRAQAVQAADKRLVKLLVPAQKKQAKNNGNEFQNMMNMFSQMQNGQTPNVDDSSNEEVTDEVRNQRLSVADQLKTGRLENSEVTIEMDDPQQAAAGNNNMLGQMGIDLGDSLGALMPKKRIQRTMPVSEAREILVREESEKLVNNADIYHDAIVRAENTGIIFIDEIDKITKGGQQGSGEVSREGVQRDILPIVEGSQISTKYGPINTDHILFIASGAFAESKPSDLIAELQGRFPIRVELDDLSKDDFVKILTEPKNALIKQYIALIGTDNIKVTFTIEAIEAIATIAYKVNHETQNIGARRLHTILEKLLEELLYEGPDMEMGEVTITESYVNERIGNIAQDKDLSRYIL

SEQ ID NO: 2158 - protein, 207 aa, Arabidopsis thaliana
  unsure (1)..(207): unsure at all Xaa locations
EEAIASLEKQEQLLSATKREGNKTLESSIPLAATIRELLRLKAAGNEAFQSGRHTEAVEHYTAALACNVESRPFTAVCFCNRAAAYKALGQFSDAIADCSLAIALDQNYSKAISRRATLFEMIRDYGQAASDMERYVNILTKQMEEKTSGTLDRSTSMSNDIRQARIRLSELEEKSRKENSLDMYLVXGVVPSCSASDIRKAYKEGR

SEQ ID NO: 2159 - protein, 498 aa, Arabidopsis thaliana
MAMIEQRPKTKIVCTLGPASRSVPMVEKLLRAGMNVARFNFSHGSHEYHQETLDNLHQAMLNTGILCAVMLDTKGPEIRTGFLKDGKPIQLKQGQEITISTDYDLKGDENTICMSYKKLAVDVNPGMVILCADGTISLLVLSCDKENGTVRCRCENSAMLGERKNVNLPGVVVDLPTLTEKDKEDIMQWGVPNQIDMIALSFVRKGSDLVQVRKLLGKHAKNILLMSKVENQEGVANFDDILVNSDAFMIARGDLGMEIPIEKIFLAQKVMIYKCNIQGKPVVTATQMLESMIKSPRPTRAEATDVANAVLDGTDCVMLSGETAAGAYPELAVRTMAKICVEAESTLDYGDVFKRIMLYSPVPMSPLESLASSAVRTANSARATLIMVLTRGGSTARLVAKYRPGMPILSVVVPEIKTDFFDWSCSDESPARHSLIFRGLIPVLYAGSARASHDESTEEAIEFATQYGKEKELCKTGDSVVALLRVGNASVIKILTVK

SEQ ID NO: 2160 - protein, 483 aa, Agastachys odorata
  unsure (1)..(483): unsure at all Xaa locations
XEKNLGRIAQIIGPVLDVAFPPGKMPNIYNALVVKGRDTVGQQINVTCEVQQLLGNNRVRAVAMSATDGLMRGMEVIDTGAPLSVPVGGATLGRIFNVLGEPVDNLGPVDTRTTSPIHRSAPAFIQLDTKLSIFETGIKVVDLLAPYRRGGKIGLFGGAGVGKTVLIMELINNIAKAHGGVSVFGGVGERTREGNDLYMEMKESGVINEQNIAESKVALVYGQMNEPPGARMRVGLTALTMAEYFRDVNEQDVLLFIDNIFRFVQAGSEVSALLGRMPSAVGYQPTLSTEMGSLQERITSTKEGSITSIQAVYVPADDLTDPAPATTFAHLDATTVLSRGLAAKGIYPAVDPLDSTSTMLQPRIVGEEHYETAQRVKQTLQRYKELQDIIAILGLDELSEEDRLTVARARKIERFLSQPFFVAEVFTGSPGKYVGLAETIRGFQLILSGELDGLPEQAFYLVGNIDEATAKAMNLEVESNLKK

SEQ ID NO: 2161 - protein, 268 aa, Escherichia coli
MERYESLFTQLKERKEGAFVPFVTLGDPGIEQSLKIIDTLIEAGADALELGIPFSDPLADGPTIQNATLRAFAAGVTPAQCFEVLALIRQKHPTIPIGLLMYANLVFNKGIDEFYAECEKVGVDSVLVADVPVEESAPFRQAALRHNVAPIFICPPNADDDLLRQIASYGRGYTYLLSRAGVTGAENRAALPLNHLVAKLKEYNAAPPLQGFGISAPDQVKAAIDAGAAGAISGSAIVKIIEQHINEPEKMLAALKAFVQPMKAATRS

SEQ ID NO: 2162 - protein, 447 aa, Nostoc sp. PCC 7120
MSKPKNNSPVVNVIQDQSVISSVITDFGSLIKGNTLGIIRPHNLEELSSALRFAKQQNLRLKARGKGYTQGGQSVAQDAFTLDLTRLNHVSKVDTVAQAIATEAGATWQDIVTTTVKYGMLPCVLPLNLEQTVGGLLSTGGIGSTSKTYGPVVANVIDLHIITGNGEYIQCSRTQTPELYHAVLGGLGGCGVIASATLALRKTKKYIRTFHLLYDSLKPWMDDHIFLGRNHQIEHLEGFCWTSAKGIRHTTSGKKFFAHWLYGLQVGIEYDEVAPSASDVLHDLNYWRLFHTEDEETVSHVFRYQPRFEVMRTSGAWNQAHPWIECFISAEALAEVLPEILDMLPLSLGDGHRAIMVAPDNLPNLFMMPPAKNILCFAILPMAVPVEDTKTFDVLEKVNQLLLRAGGKRYLSGWLGKSNFDWRQHYGTSYKTWETMKQQYDPSHVLS

SEQ ID NO: 2163 - protein, 268 aa, Salmonella typhimurium LT2
MERYENLFAQLNDRREGAFVPFVTLGDPGIEQSLKIIDTLIDAGADALELGVPFSDPLADGPTIQNANLRAFAAGVTPAQCFEMLALIREKHPTIPIGLLMYANLVFNNGIDAFYARCEQVGVDSVLVADVPVEESAPFRQAALRHNIAPIFICPPNADDDLLRQVASYGRGYTYLLSRSGVTGAENRGALPLHHLIEKLKEYHAAPALQGFGISSPEQVSAAVRAGAAGAISGSAIVKIIEKNLASPKQMLAELRSFVSAMKAASRA

SEQ ID NO: 2164 - protein, 317 aa, Ralstonia eutropha
MSAPETTAPLQPPAAPAASLPGSLAESLASSGITELLAQLDRELIGLKPVKARIRDIAALLLVDKLRAARGFSAGAPSLHMCFTGNPGTGKTTVAMRMAQILHQLGYVRRGHLVAVTRDDLVGQYIGHTAPKTKEILKKALGGVLFIDEAYYLYRPENERDYGQEAIEILLQVMENNRDDLVVILAGYKDRMDRFFESNPGMSSRVAHHVDFPDYQLDELRQIADLMLAEMQYRFDDESRAVFADYLARRMAQPHFANARSVRNALDRARLRHASRLLDDAGTVADDRTLTTITASDLLASRVFSKAAPAAQTPAKE

SEQ ID NO: 2165 - protein, 496 aa, Costus barbatus
MRTNPTTSSPVVSTLEEKNLGRTVQIIGPVLDVVFPPGKMPNIYNALVVKGRDTVGQQINVTCEVQQLLGNNRVRAVAMSATDGLMRGMEVIDTGAPLSVPVGGATLGRIFNVLGEPVDNLGPVDTSTTSPIHRPAPAFIQLDTKLSIFETGIKVVDLLAPYRRGGKIGLFGGAGVGKTVLIMELINNIAKAHGGVSVFGGVGERTREGNDLYMEMKESGVINEKNIAESKVALVYGQMNEPPGARMRVGLTALTMAEYFRDVNEQDVLLFIDNIFRFVQAGSEVSALLGRMPSAVGYQPTLSTEMGSLQERITSTKEGSITSIQAVYVPADDLTDPAPATTFAHLDATTVLSRGLAAKGIYPAVDPLDSTSTMLQPRIVGEEHYETAQRVKQTSQRYKELQDIIAILGLDELSEEDRLTVARARKIERFLSQPFFVAEVFTGSPGKYVGLAETIRGFQLILSGELDSLPEQAFYLVGNIDEATAKAMNLEGESKL

SEQ ID NO: 2166 - protein, 487 aa, Rhabdodendron amazonicum
  unsure (1)..(487): unsure at all Xaa locations
XXSGXSTXEKKNSGRIAQIIGPVLDVAFPPGKMPYIYNALVVKGRDTAGQPINVTCEVQQLLGNNRVRAVAMSATDGLMRGMEVIDTGVPLSVPVGGATLGRIFNVLGEPVDNLGPVDTRTTSPIHRSAPAFIQLDTKLSIFETGIKVVDLLAPYRRGGKIGLFGGAGVGKTVLIMELINNIAKAHGGVSVFGGVGERTREGNDLYMEMKESGVINEENIAESKVALVYGQMNEPPGARMRVGLTALTMAEYFRDVNEQDVLLFIDNIFRFVQAGSEVSALLGRMPSAVGYQPTLSTEMGSLQERITSTKEGSITSIQAVYVPADDLTDPAPATTFAHLDATTVLSRGLAAKGIYPAVDPLDSTSTMLQPRIVGEEHYETAQRVKQTLQRYKELQDIIAILGLDELSEEDRLTVARARKIERFLSQPFFVAEVFTGSPGKYVGLAETIRGFQLILSGELDSLPEQAFYLVGNIDEATAKAMNLEXES

SEQ ID NO: 2167 - protein, 456 aa, Tropaeolum tricolor
IGPVLDVAFPPGKMPNIYNALVVKGRDTVGQQINVTCEVQQLLGNNRVRAVAMSATDGLMRGMEVIDMGAPLSVPVGGATLGRIFNVLGEPVDNLGPVDTRTTSPIHKSAPAFIQLDTKLSIFETGIKVVDLLAPYRRGGKIGLFGGAGVGKTVLIMELINNIAKAHGGVSVFGGVGERTREGNDLYMEMKESGVINEQNLAESKVALVYGQMNEPPGARMRVGLTALTMAEYFRDVNEQDVLLFIDNIFRFVQAGSEVSALLGRMPSAVGYQPTLSTEMGSLQERITSTKEGSITSIQAVYVPADDLTDPAPATTFAHLDATTVLSRGLAAKGIYPAVDPLDSTSTMLQPRIVGEEHYETAQRVKETLQRYKELQDIIAILGLDELSEEDRLTVARARKIERFLSQPFFVAEVFTGSPGKYVGLAETIRGFKLILSGELDGLPEQAFYLVGNIDE

SEQ ID NO: 2168 - protein, 474 aa, Clostridium perfringens str. 13
MQKTKMIFTIGPSSDSEEILREFIRIGMNAARLNFSHGDHASHKEKIELIKRLRKEEKSATAILLDIKGPKIRTYNFKNGEAELKNGDEFTFSCGDEILGDNTKCSISYKELYEDIKPGGSILVDDGLLEFKVKEVRGTDIICEVIEGGTIKDHKGVNVPNVPIKLPAVTEKDRSDLIFGCEMEVDFVAASFIRKPEDVLEVREILDSHGGKDIKIISKIESQEGVDNIKEIIKVTDGVMVARGDMGVEIPIENVPIIQKNIIKKCNQAGKIVITATQMLDSMIRNPRPTRAEASDVCNAIFDGTDAIMLSGESASGSFPIEAAMTMSRIAKKAEANLDYNYLLRRLKDPNPNPDAFADAISYSASKTASKFPTKAIVAATQTGSTAKILSKYKPSCPIIAITPYEKVRRSLALNFGIISKKCAYFNSTDEIIEEARKVAKEFEIAETGDNIMVAAGFPTSITGGTNMLKIEKI

SEQ ID NO: 2169 - protein, 145 aa, Glycine max
SVDLAQNQNSKSHGKRMFGTDIGNISLKGTKLICPWMARILKCKINTKNISPRAQLEKIIIKKDAKQTSESYQFGPFAPAYVPKVGTSENNSVKKVHDWDSLAQEHRPQYQNQGVTPLKDLFSHYMEAWKSWYSEAAGKKSTKTL

SEQ ID NO: 2170 - protein, 569 aa, Brassica napus
MAFNLTHQLGALAGTPIKSGEMTAPSAESSLSVSPPSARMPISMNMNYTSNRNVSPPMSPVLGSRRADLSVACKAFAVETVEEQRTYKEGGIGGEKGKGGVPVFVMIPLDSVTIGNTVNRRKAMRASLQALKSAGVEGIMIDVWWGLVEREAPGAYNWGGYNELLEMAKKVGLKVQAVMSFHQCGGNVGDSVTIPLPQWVVEEVDKDPDLAYTDQWGRRNHEHISLGADTLPVLKGRTPVQCYSDFMRAFRDNFKHLLGDTIVEIQVGMGPAGELRYPSYPEQDGHEVPRDWSLPVLRQDSLSSLKAAAEAYGKPEWGGTGPTDAGHYNNWPEDTQFFKKEDGGWNTEYGDFFLTWYSQMLLDHGERILSSAKSIFQDTGVKISVKVAGIHWHYGTRSHAPELTAGYYNTRFRDGYLPIAQMLARHNAIFNFTCIEMRDHEQPQDALCAPEKLVNQVALATLAAEVPLAGENALPRYEDYAHEQILKASALSFDQNSEGENREMCAFTYLRMNPELFKADNWGKFVGFVKKMGEGRDSDRCREEVEREAEHFVHVTQPLVQEAAVALTH

SEQ ID NO: 2171 - protein, 210 aa, Glycine max
  unsure (1)..(210): unsure at all Xaa locations
MASSDPISSRHYTYNRKQKSLGLLCTNFLSLYNRDTVHLIGLDDAATRLGVERRRIYDIVNVLESIGVLSRKAKNQYTWRGFAAIPLTLQDLKEEGLKENSNSLRGPGNHDKVSDDEDDEETQSNPAATGSQSDKLNPNSTLAKPLKNRHQLLRFENRREKSLALLTQNFVKLSGCSNAELISLDXGCKLLLGDAHNTSVMRTKGRRLYD

SEQ ID NO: 2172 - protein, 553 aa, Daucus carota
MNRNSINILNYMQFTDAYLDKYGVLMTLELYSNNISGPIPSDLGNLTNLVSLDLYMNSFSGPIPDTLGKLTRLRFLRLNNNSLSGPIPMSLTNITTLQVLDLSNNRLSGPVPDNGSFSLFTPISFANNLNLCGPVTGRPCPGSPPFSPPPPFIPPSTVQPPGQNGPTGAIAGGVAAGAALLFAAPAMAFAWWRRRKPREHFFDVPAEEDPEVHLGQLKRFSLRELQVATDTFSTILGRGGFGKVYKGRLADGSLVAVKRLKEERTPGGELQFQTEVEMISMAVHRNLLRLRGFCMTPTERLLVYPYMANGSVASCLRERQPSEPPLDWPTRKRIALGSARGLSYLHDHCDPKIIHRDVKAANILLDEEFEAVVGDFGLARLMDYKDTHVTTAVRGTLGYIAPEYLSTGKSSEKTDVFGYGIMLLELITGQRAFDLARLANDDDVMLLDWVKSLLKEKKLEMLVDPDLENNYIDTEVEQLIQVALLCTQGSPMERPKMSEVVRMLEGDGLAEKWDEWQKVEVIHQDVELAPHRTSEWILDSTDNLHAFELSGPR

SEQ ID NO: 2173 - protein, 262 aa, Helicobacter pylori J99
MRYQNMFETLKKHKKMAFIPFVTLGDPNYELSFEIVKTLIISGVSALELGLAFSDPVADGTTIQASHLRALKHASMAKNFQLLKKIRGYNHDIPIGLLAYANLIFSYGVDGFYAQAKECGVDSVLIADMPLIEKELVIKSAQKHQIKQIFIASPNASSKDLEQVATHSQGYIYTLARSGVTGASHTLENDASAIIKTLKTFSSTPALLGFGISKKEHITNAKGMGADGVICGSALVKIIEENLNNEDAMLEKIKGFVGGMIS

SEQ ID NO: 2174 - protein, 476 aa, Arabidopsis thaliana
MVVQNVQDLDVLPKHSSDSFDDDGRPKRTGTVWTASAHIITAVIGSGVLSLAWAVAQIGWIGGPVAMLLFSFVTFYTSTLLCSCYRSGDSVTGKRNYTYMDAIHSNLGGIKVKVCGVVQYVNLFGTAIGYTIASAISLVTSCQQMNGPNDPCHVNGNVYMIAFGIVQIIFSQIPDFDQLWWLSIVAAVMSFAYSAIGLGLGVSKVVENKEIKGSLTGVTVGTVTLSGTVTSSQKIWRTFQSLGNIAFAYSYSMILIEIQDTVKSPPAEVNTMRKATFVSVAVTTVFYMLCGCVGYAAFGDNAPGNLLAHGGFRNPYWLLDIANLAIVIHLVGAYQVYCQPLFAFVEKEASRRFPESEFVTKEIKIQLFPGKPFNLNLFRLVWRTFFVMTTTLISMLMPFFNDVVGLLGAIGFWPLTVYFPVEMYIAQKNVPRWGTKWVCLQVLSVTCLFVSVAAAAGSVIGIVSDLKVYKPFQSEF

SEQ ID NO: 2175 - protein, 242 aa, Escherichia coli
LKERKEGAFVPFVTLGDPGIEQSLKIIDTLIEAGADALELGIPFSDPLADGPTIQNATLRAFAAGVTPAQCFEMLALIRQKHPTIPIGLLMYANLVFNKGIDEFYAQCEKVGVDSVLVADVPIEESAPFRQAALRHNVAPIFICPPNADDDLLRQIASYGRGYTYLLSRAGVTGAENRAALPLNHLVAKLKEYNAAPSLQGFGISTPDHVKAAIDAGAAGAISGSAIGKIIEQHINEPEKML

SEQ ID NO: 2176 - protein, 480 aa, Campylobacter jejuni subsp. jejuni NCTC 11168
MLKKTKIVATVGPASEKEEILRQMIINGVNVFRLNFSHGTHEYHKKNLDTIRRVAKELHTRIGILQDISGPKIRTGELKEPFELKKGDRLDFYRETILGEKIAQNHYKISINQKSILDMLKIDEYIYLYDGSIRAKVVNIDNQKIETIIENDGFLNSNKGINFPNTKINIDVITQKDKNDLLWGIKNEVDFLAISFVQNAHDIDEVREILAQNNAKISIFAKIEKFDAVENIDEIIKSSDGIMVARGDLGIEVPYYKVPNIQKEIIQKANNASKPVITATQMLFSLAKSKTATRAEISDVANAVLDGTDAVMLSEESAVGIDPANAVDIMCQTIIETEKRYPYNKFNDFNDLDNTDKIMRSSAHLATDLNADAIFSLTSSGKSAIKIARYRPNIEIIAVGHSEKTLNSLSIVWGVNPAILVNKSNELTELLKDSVRSSVEKGFMDEDKCYLLTAGFPTGVEGTSNLIRILNKEQIAYYLQ

SEQ ID NO: 2177 - protein, 1022 aa, Saccharomyces cerevisiae
  unsure (1)..(1022): unsure at all Xaa locations
GAIYSVSGPVVIAENMIGCAMYELVKVGHDNLVGEVIRIDGDKATIQVYEETAGLTVGDPVLRTGKPLSVELGPGLMETIYDGIQRPLKAIKEESQSIYIPRGIDTPALDRTIKWQFTPGKFQVGDHISGGDIYGSVFENSLISSHKILLPPRSRGTITWIAPAGEYTLDEKILEVEFDGKKSDFTLYHTWPVRVPRPVTEKLSADYPLLTGQRVLDALFPCVQGGTTCIPGAFGCGKTVISQSLSKYSNSDAIIYVGCFAKGTNVLMADGSIECIENIEVGNKVMGKDGRPREVIKLPRGSETMYSVVQKSQHRAHKSDSSREMPELLKFTCNATHELVVRTPRSVRRLSRTIKGVEYFEVITFEMGQKKAPDGRIVELVKEVSKSYPVSEGPERANELVESYRKASNKAYFEWTIEARDLSLLGSHVRKATYQTYAPILYENDHFFDYMQKSKFHLTIEGPKVLAYLLGLWIGDGLSDRATFSVDSRDTSLMERVTEYAEKLNLCAEYKDRKEPQVAKTVNLYSKVVRGNGVRNNLNTENPLWDAIIGLGFLKDGVKNIPSFLSTDNIGTRETFLAGLIDSDGYVTDEHGIKATIKTIHTSVRDGLVSLARSLGLVASVNAEPAKVDMNGTKHKISYAIYMSGGDVLLNVLSKCAGSKKFRPAPVATFVRECQGFYFELQELKENDYYGITLSDDSDHQFLLANQVVVHNCGERGNEMAEVLMEFPELYTEMSGTKEPIMKRTTLVANTSNMPVAAREASIYTGITLAEYFRDQGKNVSMIADSSSRWAEALREISGRLGEMPADQGFPAYLGAKLASFYERAGKAVALGSPDRTGSVSIVAAVSPAGGDFSDPVTTATLGITQVFWGLDKKLAQRKHFPSINTSVSYSKYTNXLNKFYDSNYPEFPVLRDRMKEILSNAEELEQVVQLVGKSALSDSDKITLDVATLIKEDFLQQNGYSTYDAFCPIWKTFDMMRAFISYHDEAQKAVANGANWSKLADSTGDVKHAVSSSKFFEPSRG

SEQ ID NO: 2178 - protein, 496 aa, Glycine max
MATSDSNMLLNYVPVYVMLPLGVVNVDNVFEDPDGLKEQLLQLRAAGVDGVMVDVWWGIIELKGPKQYDWRAYRSLFQLVQECGLTLQAIMSFHQCGGNVGDIVNIPIPQWVLDIGESNHDIFYTNRSGTRNKEYLTVGVDNEPIFHGRTAIEIYSDYMKSFRENMSDFLESGLIIDIEVGLGPAGELRYPSYPQSQGWEFPRIGEFQCYDKYLKADFKAAVARAGHPEWELPDDAGKYNDVPESTGFFKSNGTYVTEKGKFFLTWYSNKLLNHGDQILDEANKAFLGCKVKLAIKVSGIHWWYKVENHAAELTAGYYNLNDRDGYRPIARMLSRHHAILNFTCLEMRDSEQPSDAKSGPQELVQQVLSGGWREDIRVAGENALPRYDATAYNQIILNAKPQGVNNNGPPKLSMFGVTYLRLSDDLLQKSNFNIFKKFVLKMHADQDYCANPQKYNHAITPLKPSAPKIPIEVLLEATKPTLPFPWLPETDMKVDG

SEQ ID NO: 2179 - protein, 242 aa, Shigella flexneri
LKERKEGAFVPFVTLGDPGIEQSLKIIDTLIEAGADALELGIPFSDPLADGPTIQNATLRAFAAGVTPAQCFEMLALIRQKHPTIPIGLLMYANLVFNKGIDEFYAQCEKVGVDSVLVADVPVEESAPFRQAALRHNVAPIFICPPNADDDLLRQIASYGRGYTYLLSRAGVTGAKNRAALPLNHLVAKLKEYNAAPPLQGFGISAPDQVKAAIDAGAAGAISGSAIVKIIEQHINEPEKML

SEQ ID NO: 2180 - protein, 263 aa, Bacillus sp.
METALASIAGLEEVKNHVRSLHALLRIQAKRKKLGLPVDENKTLHMIFTGNPGTGKTMMARIIANVLYSLGIIKANKLVETDRSGLVAGFVGQTSIKTREVIEEAMDGVLFIDEAYALAQGGPNDFGKEAIDTLVKMMDDHRDRLVVILAGYTEDMEHFLSVNSGLKSRFPTIIEFPNYELVELMEIARKFYYDHGFKLTMGAEAKLEEVFIESSINNNFGNGRYVRNVYEKSLNLQASRLSNNEQLTEADLTEITAEDIERV

SEQ ID NO: 2181 - protein, 483 aa, Saintpaulia ionantha
  unsure (1)..(483): unsure at all Xaa locations
GVSXLEKKNLGRIVQIIGPVLDVAFPPGKMPNIYNALVVKGRDTVGQPINVTCEVQQLLGNNRVRAVAMSATDGLMRGMEVIDTGAPLSVPVGGATLGRIFNVLGEPVDNLGPVDTRTTFPIHRSAPAFIQLDTKLSIFETGIKVVDLLAPYRRGGKIGLFGGAGVGKTVLIMELINNIAKAHGGVSVFGGVGERTREGNDLYMEMKESGVINEENIAESKVALVYGQMNEPPGARMRVGLTALTMAEYFRDVNEQDVLLFIDNIFRFVQAGSEVSALLGRMPSAVGYQPTLSTEMGSLQERITSTKEGSITSIQAVYVPADDLTDPAPATTFAHLDATTVLSRGLAAKGIYPAVDPLDSTSTMLQPRIVGEEHYETAQRVKQTLQRYKELQDIIAILGLDELSEEDRLTVARARKIERFLSQPFFVAEVFTGSSGKYVDLAETIRGFQSILSGELDGLPEQAFYLVGNIDEVTTKAMNLEME

SEQ ID NO: 2182 - protein, 45 aa, Glycine max
MASGATCVQRLDGSRDSAIHTKYRISLRSSSMQEPRYPLPRVMSR

SEQ ID NO: 2183 - protein, 487 aa, Theophrasta americana
MRINPTTSGPGASVLEKKNLGRIIQIIGPVLDVSFPPGKMPNIYNALVVKGRDTAGQPINVTCEVQQLLGNNRVRAVAMSATDGLTRGMEVIDTEAALSVPVGGETLGRIFNVLGEPIDNLGPVDTRTTSPIHRSAPAFIQLDTKFSIFETGIKVVDLLAPYRRGGKIGLFGGAGVGKTVLIMELINNIAKAHGGVSVFGGVGERTREGNDLYMEMKESGVINEENLAESKVALVYGQMNEPPGARMRVGLTALTMAEYFRDVNEQDVLLFIDNIFRFVQAGSEVSALLGRMPSAVGYQPTLSTEMGSLQERITSTKEGSITSIQAVYVPADDLTDPAPATTFAHLDATTVLSRGLAAKGIYPAVDPLDSTSTMLQLRIVGEEHYETAQRVKQTLQRYKELQDIIAILGLDELSEEDRLTVARARKIERFLSQPFFVAEVFTGSPGKYVGLSETIRGFQLILSGELDGLPEQAFYLVGNIDEATAKA

SEQ ID NO: 2184 - protein, 172 aa, Triticum aestivum
  unsure (1)..(172): unsure at all Xaa locations
TEDQLVQVXREPKNAIGKQYKKLFKMNDVKLHIXENALRXIAKKAAVRETGARGLRSIMEGILTEAMFEIPDDAGEGKEKIIVVXVDEESVGXPTRXGCGAKIFRDDGALELYVYQNNIRVPGLIQRPKCSIICRLCLVAFSAAKLWVYHTFDCSSIYWIILILCKANIFTE

SEQ ID NO: 2185 - protein, 563 aa, Clostridium acetobutylicum
MSKVIYKISIDLGGIVKRNFEKETKNCGKVNEEVLFKILKSNDKSEIGIKFKFKDIKSIRQFKDSVPITEYKDYEKYINRMADGEGNVLMSEKVEYFGHTSGTTGKQKLVPCTKNSRRRASKYMALLVNRFCYDNFKENWNYARGMMIADIVMTTYTKGKIPICSATSGGMKGIKHLLPYLYTSPIEVMEIKDKETALYLHLLFGLEEEELLYISGVFISNILDLFRTLEKNNKALVRDIQKGSISEELNIDEGLRKVLNKKLKPNNKRAMELEKEFKKGFKGIAKRIWPNLLYIASVTGANFSIYNDKVYYYIDSIPIYSAAYGSTEAMIGINPYASKVLYVITPSAVFYEFIPIGEKGEESFDTLLLSELKLGGRYEVVITNYAGLYRYKIGDVVKVVGFYNKCPEIEFLYRKNQVLNMAAEKTNEEHLTYAIKNTIKKLNLDLVDYTTEPDNSITPGRYIFYFEFRNNMYGFSTEKLQNILDDELRVSNLAYNRARNNKKLGMLKVEVLAPNTFDLIKEALFNKGISKNQIKIPRVIINNKIVMDIINRNKIKFVKKSVI

SEQ ID NO: 2186 - protein, 490 aa, Eurya sp. Chung & Anderberg 1406
  unsure (1)..(490): unsure at all Xaa locations
MRIXPTTSGXGXSVLEKKNLGRIVQIIGPVLDVAFSPGKMPNIYNALVVKGRDTLGQPINVTCEVQQLLGNNRVRAVAMSATDGLTRGMEVIDTGAPLSVPVGGATLGRIFNVLGEPVDNLGPVDTRTTSPIHRSAPAFIQLDTKLSIFETGIKVVDLLAPYRRGGKIGLFGGAGVGKTVLIMELINNIAKAHGGVSVFGGVGERTREGNDLYMEMKESGVINEQNIAESKVALVYGQMNEPPGARMRVGLTALTMAEYFRDVNEQDVLLFIDNIFRFVQAGSEVSALLGRMPSAVGYQPTLSTEMGSLQERITSTKEGSITSIQAVYVPADDLTDPAPATTFAHLDATTVLSRGLAAKGIYPAVDPLDSTSTMLQPRIVGEEHYETAQRVKQTLQRYKELQDIIAILGLDELSEDDRLTVARARKIERFLSQPFFVAEVFTGSPGKYVGLAETIRGFQLILSGELDGLPEQAFYLVGNIDEATAKAMNL

SEQ ID NO: 2187 - protein, 312 aa, Clostridium thermocellum ATCC 27405
MRVIYGAESNYNFTRSTGVGLGNFDGLHVGHMALIDKLIKESESNSLDSVVYTFSKHPENIIRKELFTPLITSTRKKVELLEKTRLDYLYFEKFDETFSRMRPEDFVKDILVERLNMKLAVAGFNYRFGYRGMGDTELLRKLGRKYGFRVIVIEPVMLGDEVVSSTKIRNYILEGDMERVFAFLGRHYSVAGKVEKGRRVGNTIGFPTANIYPEDYLVLPCHGVYITRTLVDGKMYHSITNVGNNPTFGGVDRISVETYIFDFEKDIYGKEIEVFFISKIREEMRFGSVEELIEQIHKDIEIAKKVLAEDLA

SEQ ID NO: 2188 - protein, 491 aa, Reinwardtia indica
  unsure (1)..(491): unsure at all Xaa locations
XNPTTSGXGVSXIEKTXPGRIAQIIGPVLDVAFPPGKMLNIYNALLVXGQDPAGQQINVTCEVQQLLGNNRVRAVAMSATDGLMRGMEVIDTGAPLSVPVGGATLGRIFNVLGEPIDDLGPVDTRTTSPIHRPAPAFIQLDTKLSIFETGIKVVDLLAPYRRGGKIGLFGGAGVGKTVLIMELINNIAKAHGGVSVFGGVGERTREGNDLYMEMKESGVINEENIAESKVALVYGQMNEPPGARMRVGLTALTMAEYFRDVNEQDVLLFIDNIFRFVQAGSEVSALLGRMPSAVGYQPTLSTEMGSLQERITSTKEGSITSIQAVYVPADDLTDPAPATTFAHLDATTVLSRGLAAKGIYPAVDPLDSTSTMLQPQIVGEEHYETAQRVKQTLQRYKELQDIIAILGLDELSEEDRLTVARARKIERFLSQPFFVAEVFTGSPGKYVGLAETIRGFKLILSGELDSLPEQAFYLVGNIDEATAKATNLEME

SEQ ID NO: 2189 - protein, 456 aa, Pelargonium cotyledonis
  unsure (1)..(456): unsure at all Xaa locations
IGPVLDVAFPRGKMPXIYNALVVQGRDTVGQEIHVTCEVQQLLGNNRVRAVAMSATDGLMRGMEVIDTGAPLSVPVGGATLGRIFNVLGEPVDNLGPVDTRTTSPIHKSAPAFIELDTKLSIFETGIKVVDLLAPYRRGGKIGLFGGAGVGKTVLIMELINNIAKAHGGVSVFGGVGERTREGNDLYMEMKESGVINEQKVSESKVALVYGQMNEPPGARMRVGLTALTMAEYFRDVNEQDVLLFIDNIFRFVQAGSEVSALLGRMPSAVGYQPTLSTEMGSLQERITSTKKGSITSIQAVYVPADDLTDPAPATTFAHLDATTVLSRGLAAKGIYPAVDPLDSTSTMLQPRIVGDQHYEIAQRVKQTLQRYKELQDIIAILGLDELSEEDRLTVARARKIERFLSQPFFVAEVFTGSTGKYVGLAETIRGFHLFFXGEFDGLPEQAFYLVGNIDE

SEQ ID NO: 2190 - protein, 840 aa, Saccharomyces cerevisiae
MAEKEEAIFRSAEMALVQFYIPQEISRDSAYTLGQLGLVQFRDLNSKVRAFQRTFVNEIRRLDNVERQYRYFYSLLKKHDIKLYEGDTDKYLDGSGELYVPPSGSVIDDYVRNASYLEERLIQMEDATDQIEVQKNDLEQYRFILQSGDEFFLKGDNTDSTSYMDEDMIDANGENIAAAIGASVNYVTGVIARDKVATLEQILWRVLRGNLFFKTVEIEQPVYDVKTREYKHKNAFIVFSHGDLIIKRIRKIAESLDANLYDVDSSNEGRSQQLAKVNKNLSDLYTVLKTTSTTLESELYAIAKELDSWFQDVTREKAIFEILNKSNYDTNRKILIAEGWIPRDELATLQARLGEMIARLGIDVPSIIQVLDTNHTPPTFHRTNKFTAGFQSICDCYGIAQYREINAGLPTIVTFPFMFAIMFGDMGHGFLMTLAALSLVLNEKKINKMKRGEIFDMAFTGRYIILLMGVFSMYTGFLYNDIFSKTMTIFKSGWKWPDHWKKGESITATSVGTYPIGLDWAWHGTENALLFSNSYKMKLSILMGFIHMTYSYFFSLANHLYFNSMIDIIGNFIPGLLFMQGIFGYLSVCIVYKWAVDWVKDGKPAPGLLNMLINMFLSPGTIDDELYPHQAKVQVFLLLMALVCIPWLLLVKPLHFKFTHKKKSHEPLPSTEADASSEDLEAQQLISAMDADDAEEEEVGSGSHGEDFGDIMIHQVIHTIEFCLNCVSHTASYLRLWALSLAHAQLSSVLWTMTIQIAFGFRGFVGVFMTVALFAMWFALTCAVLVLMEGTSAMLHSLRLHWVESMSKFFVGEGLPYEPFAFEYKDMEVAVASASSSASS

SEQ ID NO: 2191 - protein, 371 aa, Guillardia theta
MIAFISNYITFKTNRTYKNNICQLHCQSLNDNDIEARKIKEEAERRKQQAERNRMQKQMKIDRLNAIPEDAEAGTVEEFMYKDGVKEILEKLDNDLVGLVPVKSRVREIAALLVVDKLRRNLGLDTSVPSLHMCFTGAPGTGKTTVAMRMGQILQRMGYCRSGHLVVATRDDLVGQYVGHTAPKTKEVIKKAMGGVLLIDEAYYLYNASNDRDYGQESIEILLNVMEENREDLVVVLAGYKDRMDKFFSFIPGMSSRVGNHIEFPNYEAEELLSIAKVMCRDLEYEMSKDAEPIFFEYIKKRMTMPYFSNARTVRNAVDRARMRAAIRLFNQATSGNSNGLVSKKQLMTLEKEDFVSVEELIARGDNAIVE

SEQ ID NO: 2192 - protein, 469 aa, Lobostemon fruticosus
GSGVSMLEKNNLGRVVQIIGPVLDVAFSPGKMPNIYNALVVKGRDTVGQPINVTCEVQQLLGNNRVRAVAMSATEGLTRGMEVIDTGAALSVPVGGATLGRIFNVLGEPVDNLGPVDTRTTSPIHRPAPAFIQLDTKLSIFETGIKVVDLLAPYRRGGKIGLFGGAGVGKTVLIMELINNIAKAHGGVSVFGGVGERTREGNDLYMEMKESGVINEENIAESKVALVYGQMNEPPGARMRVGLTALTMAEYFRDVNEQDVLLFIDNIFRFVQAGSEVSALLGRMPSAVGYQPTLSTEMGTLQERITSTKAGSITSIQAVYVPADDLTDPAPATTFAHLDATTVLSRGLAAKGIYPAVDPLDSTSTMLQPRIVGEEHYETAQRVKETLQRYKELQDIIAILGLDELSEEDRLTVARARKIERFLSQPFFVAEVFTGSPGKYVGLAETIRGFQLILSGELDGLPEQAFYLV

SEQ ID NO: 2193 - protein, 490 aa, Coffea arabica
  unsure (1)..(490): unsure at all Xaa locations
XGSGVSTLEKKNMGRIVQIIGPVLDVAFPAGKMPNIYNALVVKGRDTVGQPINVTCEVQQLLGNNRVRAVAMSSTDGLTRGMEVIDTGAPLSVPVGGATLGRIFNVLGEPVDNLGAVDTRTTSPIHRSAPAFIQLDTKLSIFETGIKVVDLLAPYRRGGKIGLFGGAGVGKTVLIMELINNIAKAHGGVSVFGGVGERTREGNDLYMEMKESGVINKENIAESKVALVYGQMNEPPGARMRVGLTALTMAEYFRDVNEQDVLLFIDNIFRFVQAGSEVSALLGRMPSAVGYQPTLSTEMGSLQERITSTKEGSITSIQAVYVPADDLTDPAPATTFAHLDATTVLSRGLAAKGIYPAVDPLDSTSTMLQPRIVGEEHYETAQRVKQTLQRYKELQDIIAILGLDELSEEDRLTVARARKIERFLSQPFFVAEVFTGSPGKYVGLAETIRGFQLILSGELDSLPEQAFYLVGNIDEATAKAMNLEMENNLK

SEQ ID NO: 2194 - protein, 592 aa, Saccharomyces dairenensis
  unsure (1)..(592): unsure at all Xaa locations
ISQSLSKYSNSDTIIYVGCFAKGTQVMMADGSDKSIEEIQIGEQVMGKDGNPRTVIALPRGKETMYEVCHITPHRTTSGENFGVMDYVCSGNHKLVLRTPQNVTLTTHELDGQTYTNVSYFALEESAYGQIVXKKTKSYQHQRHGGKQETEKKVNEFLATINPDSIEWDVEAKDYKKLGYNVKKSSHQMINPVFKESGNLIAKLNELGFSKEIAPQMGWLLGFWVGNGSITTSSFSIDSLDTQLLDRITEYGKLFALTTTSATNHCRNYSGSGNQDIELSKINNGKVETDGTITFDDDTEREPSEQELIDMESSGCKASSEMTVALGAPLVRGNAIRQLLTENNVFLKLIESFGVRKENGSEYVKAIPMHLSYDDIEVREQFIAGLVDSIGHVKRTSNGTIECAAISTAYKSVSEGLIRLARSLGIKVSVTTKRECLDKHNVKHQICYSICLSGATLSGALRFCALDKNNANSKKPFVRGPVPFYFTLKEKDEDNYYGITLPDSTDKQYLLSSLALVHNCGERGNEMAEVLMEFPELFTEQTGRKEPIMKRTTLVANTSNMPVAAREASIYTGITLAEYFRDQGKDVSMIAD

SEQ ID NO: 2195 - protein, 268 aa, Vibrio parahaemolyticus RIMD 2210633
MSRYEKMFARLNEKNQGAFVPFVTVCDPNAEQSYKIMETLVESGADALELGIPFSDPLADGPTIQGANIRALDSGATPDICFEQIGKIRAKYPDLPIGLLMYANLVYSRGIESFYERCAKAGIDSVLIADVPTNESAEFVAAAEKFGIHPIFIAPPTASDETLKQVSELGGGYTYLLSRAGVTGAETKANMPVDHMLEKLNQFNAPPALLGFGISEPAQVKQAIEAGAAGAISGSAVVKIIEAHVEQPQIMLDKLGEFVSAMKAATQK

SEQ ID NO: 2196 - protein, 307 aa, Gluconobacter oxydans
MILHTDWRNIPAAARNTVAALGNFDGVHRGHVHLLDTLRMARPDHPLSVVTFDPHPRTLFRPQDPPFRLMLPDVRAAALGEQGVDHVFQIPFDAEFSRLSAEQFVNDVLVNGLGVAHVACGADFAFGHRRTGNIERLETLLAPHGIGLTIVPQLSDEGGPISSSRIRRLLQEGYPERAAQELGRPWSITGPVMHGDQRGRLLGFPTANIPLTQHVEPARGVYAARVTLPDGRVIPGVANIGRRPTINDGQESRLEVHLFDFNEDLYGQILSVALIALLREEKRFSGLDELKTQIAADAAQARSILNA

SEQ ID NO: 2197 - protein, 285 aa, Arabidopsis thaliana; identical to SEQ ID NO: 1912

SEQ ID NO: 2198 - protein, 111 aa, Ipomoea ramosissima
HHATLNFTCLEMRDSEQPAEAKSAPQELVQQLLSGGWKEYIDVAGENALPRYDATAYSQMLLNVRPDGVNLNGPPKLKMSGLTYLRLSDDLLQTDNFQLFKKFVKKMHADL

SEQ ID NO: 2199 - protein, 486 aa, Pelliciera rhizophorae
SGPGASALEKKNLGRIVQIIGPVLDVAFSPGKMPNIYNALVVKGRDTVGQPINVTCEVQQLLGNNRVRAVAMSATDGLTRGMEVIDTGAPLSVPVGGATLGRIFNVLGEPVDNLGPVDTRTTSPIHKSAPAFIQLDTKLSIFETGIKVVDLLAPYRRGGKIGLFGGAGVGKTVLIMELINNIAKAHGGVSVFGGVGERTREGNDLYMEMKESGVINEQNFAESKVALVYGQMNEPPGARMRVGLTALTMAEYFRDVNEQDVLLFIDNIFRFVQAGSEVSALLGRMPSAVGYQPTLSTEMGSLQERITSTKEGSITSIQAVYVPADDLTDPAPATTFAHLDATTVLSRGLAAKGIYPAVDPLDSTSTMLQPRIVGEEHYETAQKVKQTLQRYKELQDIIAILGLDELSEEDRLTVARARKIERFLSQPFFVAEVFTGSPGKYVGLAETIRGFQLILSGELDGLPEQAFYLVGNIDEATAKAMNLEME

SEQ ID NO: 2200 - protein, 293 aa, Guillardia theta
MSISNETTVNLQEEYEKRQIQEVLDELDRDLVGLIPVKTRIKEIAALLLVHRLRKLLGLTSANPGLHMSFTGSPGTGKTTVALKMADILFRLGYVRKGHLITVTRDDLVGQYIGHTAPKTKEVLKRAMGGVLFIDEAYYLYKPDNERDYGAEAIEILLQVMENQRDDLVIIFAGYKDRMDSFYESNPGLSSRVANHIDFPDYTPEELLIIGKIMLEEQQYRLTKESELVLLDYIKLRMKEPHFANARSVRNAIDRARMRQANRMFNAGDKVLTKSDLVTIQPEDLLKSRLFKK

SEQ ID NO: 2201 - protein, 192 aa, Glycine max
  unsure (1)..(192): unsure at all Xaa locations
MFPGQSQQRKVVGGCTTMDFDLDLETSWPLDHMAFGSNPMSPFLVSTSSDQPYSPLWAFSDGEDPKLPASAFSDCHKIFSCDSNSIAEKPVENDDNKKNLPPLVPMPPVENLDGYCVIKERMTQALRYFKELTELNVLAQVWAPVRNGNXXCLQLSGQPFVLDPHSNGLHQYRTVSLMYMFSVDGGDDGIFG

SEQ ID NO: 2202 - protein, 202 aa, Triticum aestivum
MSAAPPSSTAAETTATAPAPLPRLPIPNPLPLFAERGGGARLRHHAYSRKPKSLGLRCSNFVALYDWDGVESIGLDDASRRLGVERRRIYDIVNVLESVGILARKAKNRYSWIGFGGVPMALRELKERALREKSGLAPLPAEELSAANMSDDEDDDKLGDPEAEREGEKLNQTVDNPSDMPDAPPCRLRSDHRKEMSLGLLT

SEQ ID NO: 2203 - protein, 739 aa, Glycine max
MGLNVPQRQLTLLLLIALAAAEKTLHGCRSTCGSVSSIPYPFGIGNSSVTGENCFLEKALMLTCINSTLYHGNGNVQILDITLDSKMVVLAFISKVCKNESVGRVVTKGHEAGLRTPAFTVSSEDNKFRITQIFTYGYLNSFTNDIRSQMGCFTRCDTIESVQSMQEDGKCTGIGCCQMDIPPRMKNISIQAFSYYNFNYSSDFNKCGYSFVAKNGNYTFSMKHLKSVPFDKAPMVVDWAVGKQCFNSKGKACKSNSVCENSPSGYGYRCKCKKGFEGNPYHPDGCKDIDECKTGSHTCISEKNCLNTNGSHICLCPKSGNGTKGSEGCHQQEVVTKVVIGVGAGIVILFVGTTSLYLIYQKKKLNKLREKYFQQNGGSILLQKLSTRENSSQIQIFTVEQLNKATDNFDESLIIGKGGFGTVFKGHLADNRIVAIKKSKIVDKSQSEQFANEVIVLSQINHRNVVKLLGCCLETEVPLLVYEFVNNGTLFDFIHTERKVNNETWKTRVRIAAEAAGALTYLHSEASIAIIHRDVKTANILLDNTYTAKVSDFGASRLVPIDQAEIATMVQGTFGYLDPEYMRTSQLTEKSDVYSFGVVLVELLTGEKPYSFGKPEEKRSLTNHFLSCLKEDRLSDVVQDGIMNEENKKEIMEVAILAAKCLRLNGEERPSMKEVAMELERMRLTEKHPWINTFQNPEEAQLLQKGSSSLCVSGDSGSHQYTGYDSINDHAQIALDDGR

SEQ ID NO: 2204 - protein, 458 aa, Forgesia racemosa
MPNIYNALVVKGRDTGGQPINVTCEVQQLLGNNRVRAVAMSATDGLTRGMEVIDTGAPLSVPVGGATLGRIFNVLGEPVDNLGPVDTRTTSPIHRSAPAFIQLDTKLSIFETGIKVVDLLAPYRRGGKIGLFGGAGVGKTVLIMELINNIAKAHGGVSVFGGVGERTREGNDLYMEMKESGVINEQNIGESKVALVYGQMNEPPGARMRVGLTALTMAEYFRDVNEQDVLLFIDNIFRFVQAGSEVSALLGRMPSAVGYQPTLSTEMGSLQERITSTKEGSITSIQAVYVPADDLTDPAPATTFAHLDATTVLSRGLAAKGIYPAVDPLDSTSTMLQPRIVGEEHYEIAQRVKQTLQRYKELQDIIAILGLDELSEEDRLTVARARKIERFLSQPFFVAEVFTGSPGKYVGLAETIRGFQLILSGELDGLPEQAFYLVGNIDEATAKAMNLEMESNLK

SEQ ID NO: 2205 - protein, 492 aa, Bulbine succulenta
NPTTFGTAVSTLERKNLGRIRSNNRPVLDVVFPPGKMPNIYNALVVKGRDTVGQQINVTCEVQQLLGNNRVRAVAMSATDGLTRGMEVINTGAPLSVPVGGATLGRIFNVLGEPVDNLGPVDTRTTSPIHRSAPAFIQLDTKLSIFETGIKVVDLLAPYRRGGKIGLFGGAGVGKTVLIMELINNIAKAHGGVSVFGGVGERTREGNDLYMEMKESGVINEKNIAESKVALVYGQMNEPPGARMRVGLTALTMAEYFRDVNEQDVLLFIDNIFRFVQAGSEVSALLGRMPSAVGYQPTLSTEMGSLQERITSTKEGSITSIQAVYVPADDLTDPAPATTFAHLDATTVLSRGLAAKGIYPAVDPLDSTSTMLQPRIVGEEHYETAQRVKETLQRYKELQDIIAILGLDELSEEDRLTVARARKIERFLSQPFFVAEVFTGSPGKYVGLVETIRGFQLILSGELDGLPEQAFYLVGNIDEATAKAINLEIEDK

SEQ ID NO: 2206 - protein, 608 aa, Arabidopsis thaliana
MGGLIDLNVMETEEDETQTQTPSSASGSVSPTSSSSASVSVVSSNSAGGGVCLELWHACAGPLISLPKRGSLVLYFPQGHLEQAPDFSAAIYGLPPHVFCRILDVKLHAETTTDEVYAQVSLLPESEDIERKVREGIIDVDGGEEDYEVLKRSNTPHMFCKTLTASDTSTHGGFSVPRRAAEDCFPPLDYSQPRPSQELLARDLHGLEWRFRHIYRGQPRRHLLTTGWSAFVNKKKLVSGDAVLFLRGDDGKLRLGVRRASQIEGTAALSAQYNQNMNHNNFSEVAHAISTHSVFSISYNPKASWSNFIIPAPKFLKVVDYPFCIGMRFKARVESEDASERRSPGIISGISDLDPIRWPGSKWRCLLVRWDDIVANGHQQRVSPWEIEPSGSISNSGSFVTTGPKRSRIGFSSGKPDIPVSEGIRATDFEESLRFQRVLQGQEIFPGFINTCSDGGAGARRGRFKGTEFGDSYGFHKVLQGQETVPAYSITDHRQQHGLSQRNIWCGPFQNFSTRILPPSVSSSPSSVLFTNSNSPNGRLEDHHGGSGRCRLFGFPLTDETTAVASATAVPCVEGNSMKGASAVQSNHHHSQGRDIYAMRDMLLDIAL

SEQ ID NO: 2207 - protein, 890 aa, Saccharomyces cerevisiae
MNQEEAIFRSADMTYVQLYIPLEVIREVTFLLGKMSVFMVMDLNKDLTAFQRGYVNQLRRFDEVERMVGFLNEVVEKHAAETWKYILHIDDEGNDIAQPDMADLINTMEPLSLENVNDMVKEITDCESRARQLDESLDSLRSKLNDLLEQRQVIFECSKFIEVNPGIAGRATNPEIEQEERDVDEFRMTPDDISETLSDAFSFDDETPQDRGALGNDLTRNQSVEDLSFLEQGYQHRYMITGSIRRTKVDILNRILWRLLRGNLIFQNFPIEEPLLEGKEKVEKDCFIIFTHGETLLKKVKRVIDSLNGKIVSLNTRSSELVDTLNRQIDDLQRILDTTEQTLHTELLVIHDQLPVWSAMTKREKYVYTTLNKFQQESQGLIAEGWVPSTELIHLQDSLKDYIETLGSEYSTVFNVILTNKLPPTYHRTNKFTQAFQSIVDAYGIATYKEINAGLATVVTFPFMFAIMFGDMGHGFILFLMALFLVLNERKFGAMHRDEIFDMAFTGRYVLLLMGAFSVYTGLLYNDIFSKSMTIFKSGWQWPSTFRKGESIEAKKTGVYPFGLDFAWHGTDNGLLFSNSYKMKLSILMGYAHMTYSFMFSYINYRAKNSKVDIIGNFIPGLVFMQSIFGYLSWAIVYKWSKDWIKDDKPAPGLLNMLINMFLAPGTIDDQLYSGQAKLQVVLLLAALVCVPWLLLYKPLTLRRLNKNGGGGRPHGYQSVGNIEHEEQIAQQRHSAEGFQGMIISDVASVADSINESVGGGEQGPFNFGDVMIHQVIHTIEFCLNCISHTASYLRLWALSLAHAQLSSVLWDMTISNAFSSKNSGSPLAVMKVVFLFAMWFVLTVCILVFMEGTSAMLHALRLHWVEAMSKFFEGEGYAYEPFSFRAIIE

SEQ ID NO: 2208 - protein, 443 aa, Arabidopsis thaliana
MYVVPPPQRSDSGSNGDLRVYQTWKGSNIFFLQGRFVFGPDVRSLALTICLIAVPVTIFCIFVARKLIDDFSDSWGVSIVAVAVVFTIYDLILLLLTSGRDPGIIPRNAHPPEPETLDGNMDAGAGQTPQLRLPRIKEVQLNGITFKVKYCDTCMLYRPPRCSHCSICNNCVERFDHHCPWVGQCIGMRNYRFFFMFVFSTTLLCIYVFAFCWVYIRKIMESEHTTTWKAMLKTPASIVLIIYTFISMWFVGGLTVFHLYLISTNQTTYENFRYRYDRRSNPHNKGVVNNFKETFFSTIPPSKNDFRAMVQREPPLPPRSVAGGFMSPNMGKANDEIEMGRKAVWADMGPAMSDHGDGKHGNNERLHVKDGELGELSPDIRATVDEQSDRPSMHPRRSSWGRKSGSWDMSPEVMALAARVGEQNQNGGGSSSGSGLVTENRPT

SEQ ID NO: 2209 - protein, 432 aa, Clostridium acetobutylicum
MAKYDNKKQLRCSFCGKSQDQVKRLIAGPGVYICDECIELCSEIIADEFEETPQINVGSLPKPSEIKDYLDQYVVGQEDAKKSLSVAVYNHYKRINSNLSNNDDIELQKSNILLLGPTGCGKTFLAQTLAKFLNVPFAIADATTLTEAGYVGEDVENILLKLIQNADYDVERAEKGIIYIDEIDKIARKSENPSITRDVSGEGVQQALLKILEGTVASVPPQGGRKHPHQEFIQINTTNILFICGGAFDGVDKIIENRTRVSTIGFGASIQSKQQKDIGAILKKIMPGDLLKFGLIPEFIGRLPIIVTLNSLDQGALVKVLSEPKNALVKQYEKLLQMDNVELEFKDGALKAIASEAISRSTGARGLRAIVEDIMKDIMFDIPSREDVKKVIVTENTINTKQPELVLEEGAKAIEAPKKKEKSKTKKDIESA

SEQ ID NO: 2210 - protein, 478 aa, Byttneria filipes
  unsure (1)..(478): unsure at all Xaa locations
KENLGRISQIIGPVLDVAFPPGKMPNIYNALVVKGRDTVGQQINVTCEVQQLLGNNRVRAVAMSATDGLMRGMEVIDTGAPLSVPVGGATLGRIFNVLGEPIDNLGPVDTRTTSPIHKPAPAFIQLDTKLSIFETGIKVVDLLAPYRRGGKIGLFGGAGVGKTVLIMELINNIAKAHGGVSVFGGVGERTREGNDLYMEMKESGVINEQNLAESKVALVYGQMNEPPGARMRVGLTALTMAEYFRDVNEQDVLLFIDNIFRFVQAGSEVSALLGRMPSAVGYQPTLSTEMGSLQERITSTKXGSITSIQAVYVPADDLTDPAPATTFAHLDATTVLSRGLAAKGIYPAVDPLDSTSTMLQPRIVGEEHYETAQRVKQTLQRYKELQDIIAILGLDELSEEDRLTVARAXKIERFLSQPFFVAEVFTGSPGKYVGXAXTIRGFKLILSGELDXLPEQAFYXVGXIDEATAKATXLEXES

SEQ ID NO: 2211 - protein, 218 aa, Picea mariana
KIEIKRIENTTNRQVTFCKRRNGLLKKAYELSVLCDAEVALIVFSSRGRLYEFANHSVKRTIERYKKTCVDNNHGGAISESNSQYWQQEAGKLRQQIEILQNANRHLMGDGLTALNIKELKQLEVRLEKGIGRVRSKKNEMLLEEIDIMQRREHILIQENEILRSKIAECQNSHNTNMLSAPEYDALPAFDSRNFLHANLIDAAHHYAHQEQTTLQLG

SEQ ID NO: 2212 - protein, 502 aa, Nicotiana sylvestris
MEHSLMATRSYFLLFSSFTFLLILLSFPVEKSHALEAKETIESHFHTLQLTSLLPSSSCNTATKGKRRGASLEVVNRQGPCTQLNQKGAKAPTLTEILAHDQARVDSIQARVTDQSYDLFKKKDKKSSNKKKSVKDSKANLPAQSGLPLGTGNYIVNVGLGTPKKDLSLIFDTGSDLTWTQCQPCVKSCYAQQQPIFDPSASKTYSNISCTSTACSGLKSATGNSPGCSSSNCVYGIQYGDSSFTVGFFAKDTLTLTQNDVFDGFMFGCGQNNRGLFGKTAGLIGLGRDPLSIVQQTAQKFGKYFSYCLPTSRGSNGHLTFGNGNGVKTSKAVKNGITFTPFASSQGATFYFIDVLGISVGGKALSISPMLFQNAGTIIDSGTVITRLPSTVYGSLKSTFKQFMSKYPTAPALSLLDTCYDLSNYTSISIPKISFNFNGNANVDLEPNGILITNGASQVCLAFAGNGDDDTIGIFGNIQQQTLEVVYDVAGGQLGFGYKGCS

SEQ ID NO: 2213 - protein, 317 aa, Oryza sativa
  unsure (1)..(317): unsure at all Xaa locations
XSCGDATTEGLIKVRPAYSFGVDPVWHGSRSELPFLNSLKMKLSILIGVAQMNLGIMMSYFNAKFFRNAINVWYQFIPQLIFLNSLFGYLSLLIIIKWCTGSKADLYHVMIYMFLSPTDDLGENELFPGQKLVQLVLLLLALVSVPWMLIPKPFFLKKQHEQRHQGQQYTMLQATDESVTELEEHQDDPHHHEEFEFSEVFVHQLIHTIEFVLGAVSNTASYLRLWALSLAHSELSTVFYEKVLVLSWGYNNIFILIIGAVIFLFATIGVLLVMETLSAFLPXALRLHWVEFQNKFYEGDGYKFVPFAFASIIEEED

SEQ ID NO: 2214 - protein, 276 aa, Halobacterium sp. NRC-1
MTRSDLAAAFDDGPALVSYVVAGDPTPAATAEYIDALVDGGTDVIELGLPFSEPVAEGTTIQNAIKRALDAGMTPDAYLDLVARIDADVPVVCMTYYNLLFQYGDRAGPAAFVSAAAEAGVSGFVVPDLPVDESGPLREACRAHGLDLVFVVAPTTTADRRERMLDLTTGFVYVQGRVGTTGAREEVSAATPDALAALQHTDIPKAVGFGVSSGEQAREITASGADGVIVGSAYVDTVADGVADDDPPSVVADRLRDLAAELKAGAARGVPEPEHK

SEQ ID NO: 2215 - protein, 270 aa, Buchnera aphidicola (Melaphis rhois)
MNRYQKLCKKLIPFKKGCFIPFVVLGDPSIDMSLKIINALIENGADGLELGIPFSDPIADGEIIQKANLRAFNSKINLHKCFDILSEIREKHQTIPIGLLLYSNLIFKFGINKFYLKCYKIGIDSILIADLPIEESYVFRKYAVINNILPVFICPPDAKKNVIKNIAIHSQGYIYLLSRSGVTGINQEIMIPPLSLINKLKKLTKTPLIQGFGVSYPYQIQKIILSGISGVICGSIIAKLIENYFQDDDKLIKEIIFLSKSFKKATIIIE

SEQ ID NO: 2216 - protein, 498 aa, Cephalanthus occidentalis
  unsure (1)..(498): unsure at all Xaa locations
XXXNPTTSGSGVSTLEKKNLGRIVQIIGPVLDAAFPPGKMPNIYNALVVKGRDTVGQSINVTCEVQQLLGNNRVRAVAMSATDGLMRGMEVIDTGAPLSVPVGGATLGRIFNVLGEPVDNLGPVDTRTTSPIHRSAPAFIQLDTKLSIFETGIKVVDLLAPYRRGGKIGLFGGAGVGKTVLIMELINNIAKAHGGVSVFGGVGERTREGNDLYMEMKESGVINEENIAESKVALVYGQMNEPPGARMRVGLTALTMAEYFRDVNEQDVLLFIDNIFRFVQAGSEVSALLGRMPSAVGYQPTLSTEMGSLQERITSTKEGSITSIQAVYVPADDLTDPAPATTFAHLDATTVLSRGLAAKGIYPAVDPLDSTSTMLQPRIVGEEHYETAQRVKQTLQRYKELQDIIAILGLDELSEEDRLTVARARKIERFLSQPFFVAEVFTGSPGKYVGLAETIRGFQLILSGELDGLPEQAFYLVGNIDEATAKAMNLEMENNLKK

SEQ ID NO: 2217 - protein, 476 aa, Lycopersicon esculentum
MNSAPLSTPAPVTLPVRSIPGSYGLPLVGPIADRLDYFWFQKPENFFTKRMEKHKSTVFRTNVPPCFPFFGSVNPNVVAVLDVKSFSHLFDMEIVEKANVLVGDFMPSVVYTGDMRVCAYLDTSEPKHAQIKNFSQDILKRGSKTWVPTLLKELDTMFTTFEADLSKSNTASLLPALQKFLFNFFSLTILGADSSVSPEIANSGYIFLDSWLAIQLAPTVSIGVLQPLEEILVHSFAYPFFLVKGNYEKLVQFVKNEAKEVLSRAQTEFQLTEQEAIHNLLFILGFNAFGGFSIFLPTLLGNLGDEKNADMQEKLRKEVRDKVGVNPENLSFESVKEMELVQSFVYETLRLSPPVPSQYARARKDFKLSSHDSVYEIKKGELLCGYQPLVMKDPKVFDEPEKFVLERFTKEKGKELLNYLFWSNGPQTGRPTESNKQCAAKDMVTLTASLIVAYIFQKYDSVSFSSGSLTSVKKAS

SEQ ID NO: 2218 - protein, 244 aa, Liquidambar styraciflua
LATTEFPNQSSEGSSSQKKMGRGKIEIKRIENTTNRQVTFCKRRNGLLKKAYELSVLCDAEIALIVFSSRGRLYEYANNSVKSTIERYKKASDTSNPGSVSETNAQFYQQESSKLRRQIRDIQNLNRHIMGEALSSLTFRELKNLEGRLEKGISRIRSKKNELLFAEIEYMQKREIELQNANMYLRAKIAENERNQQQTELMPGSVYETMPSSQPYDRSFLVANLLEPPNHHYSRQDQTPLQLV

SEQ ID NO: 2219 - protein, 559 aa, Pirellula sp.
MSPHPMTLLRRSMLRYKIGRLQRYLADAERARDIQRENLLHRIHQNADTAFGRDHGFSEIRTLEDFRRRVPIAGYEAARPYVDRVIQGETTALFPENTKVVMFATTSGTTDHPKMIPVTEDFYRQYKAGWQYWGTGVYRDYPHLLQMKSLQFSSHWNVTQTPSGAPCGNISGLAAETRPFYIGSLFVLPACVIQITEHLAKHYTALRLSLACDRVGKIVTANPSTLVEVAKFADTMKETLIRDIHDGTLTGDQPIPDAIRQQLRSRLRPNPRRARQLQQIVDRTGHLYPKDAWPDLTLLAVWTGGSVGLYLNQLPEYYGDAAIRDHGLSASEGRMTVPLQNGSPSGMLDYSSHHFEFIPESERDSKTPHVLEAWELTEGENYFIVLTTASGLYRYDIHDLVRCDGFCGQTPMLSFLNKGKNFCSFTGEKLSEHQVMQAMQQTLQSINAPSCTFTLAPTLGERPRYHLVLDDSSLPNLCERIGQELQNQLAQVNCEYADKCASGRIEPIQVTRVPAGTWEKLRASKTSKRGNFEEYKHPCLTNDPNFLQNLSKLDSASPS

SEQ ID NO: 2220 - protein, 358 aa, Nicotiana tabacum
MATFTLLSLFILLSLLSVAHSGSIGINYGRIANNLPPPAQVVQLLKTQGVNRVKLYDTDSNVLTALSGSNISVTVALPNEQLADAAGKQSFTDSWVQSNILTYYPKTQIESIAVGNEVFVDPKNTTKFLVPAMKNMYASLVKYGVAQSIKVSSPVALSALGNSYPSSAGSFKPDLVEPVIKPMLSFLKQTGSYLMVNIYPFFAYAANTDTISLDYALFKDNKGVTDPNNGLVYKSLFEAQIDAVYAAMKAVGFGDVAMAVSETGWPSKGDENEAGAGADNAAAYNGNLVRRVLTGSGTPLKPNEPLDVFLFALFNENQKPGPTSERNYGLFYPNEQKVYDITLTKEGLENGPTMNNGR

SEQ ID NO: 2221 - protein, 271 aa, Rhodospirillum rubrum
MSATTPTTDRLSRRFAALKAEGRGGLVTYVMAGDPDQETALALMRGLPGAGADIIELGMPFSDPMADGPAIQAAALRALAAGMTLTGTLETLKAFRATDDDTPVVLMGYYNPIHYYGAEAFARDAALAGADGLIIVDLPPEEADELLPFLRAQGLHLIMLATPTTDEARLPAILERASGFLYYVSIAGITGTAAADAGGVAQAVARIRRKTDLPIAIGFGVSTPAQAATMARVGDAAVVGSAIVRRLAEGGDVLGFVGELAGALRKVDAAG

SEQ ID NO: 2222 - protein, 242 aa, Shigella sonnei
LKERKEGAFVPFVTLGDPGIEQSLKIIDTLIEAGADALELGIPFSDPLADGPTIQNATLRAFAAGVTPAQCFEMLALIRQKHPTIPIGLLMYANLVFNKGIDEFYAQCEKVGVDSVLVADVPIEESAPFRQAALRHNVAPIFICPPNADDDLLRQIASYGRGYTYLLSRAGVTGAENRAALPLNHLVAKLKEYNAAPPLQGFGISTPDQVKAAIDSGAAGAISGSTIVKINEQHINEPEKML

SEQ ID NO: 2223 - protein, 535 aa, Hordeum vulgare
MEVNVKGNYVQVYVMLPLDAVSVNNRFEKGDELRAQLRKLVEAGVDGVMVDVWWGLVEGKGPKAYDWSAYKQLFELVQKAGLKLQAIMSFHQCGGNVGDAVNIPIPQWVRDVGTCDPDIFYTDGHGTRNIEYLTLGVDNQPLFHGRSAVQMYADYMTSFRENMKEFLDAGVIVDIEVGLGPAGEMRYPSYPQSHGWSFPGIGEFICYDKYLQADFKAAAAAVGHPEWEFPNDVGQYNDTPERTQFLRDNGTYLSEKGRFFLAWYSNNLIKHGDRILDEANKVFLGYKVQLAIKISGIHWWYKVPSHAAELTAGYYNLHDRDGYRTIARMLKRHRASINFTCAEMRDSEQSSQAMSAPEELVQQVLSAGWREGLNVACENALPRYDPTAYNTILRNARPHGINQSGPPEHKLFGFTYLRLSNQLVEGQNYANFKTFVDRMHANLPRDPYVDPMAPLPRSGPEISIEMILQAAQPKLQPFPFQEHTDLPVGPTGGMGGQAEGPTCGMGGQVKGPTGGMGGQAEDPTSGMGGELPATM

SEQ ID NO: 2224 - protein, 483 aa, CAJOPHORA ACUMINATA
SGPGISTLEKKNLGRIAQIIGPVLDVAFPPGKMPNIYNALVVKGRDTVGQPINVTCEVQQLLGNNRVRAVAMSATDGLMRGMEVLDTGAPLSVPVGGATLGRIFNVLGEPVDNLGPVDTRTTSPIHRSAPAFIQLDTKLSIFETGIKVVDLLAPYRRGGKIGLFGGAGVGKTVLIMELINNIAKAHGGVSVFGGVGERTREGNDLYMEMKESGVINEQNIAESKVALVYGQMNEPPGARMRVGLTALTMAEYFRDVNEQDVLLFIDNIFRFVQAGSEVSALLGRMPSAVGYQPTLSTEMGSLQERITSTKEGSITSIQAVYVPADDLTDPAPATTFAHLDATTVLSRGLAAKGIYPAVDPLDSTSTMLQPRIVGEEHYETAQRVKQTLQRYKELQDIIAILGLDELSEEDRLTVARARKIERFLSQPFFVAEVFTGSPGKYVGLAETIRGFQLILSGEFDGLPEQAFYLVGNIDEATAKAMNL

SEQ ID NO: 2225 - protein, 443 aa, Tmesipteris tannensis
VFPPDEMPYIYNSLIVKGQNPAGQQINVTCEVQQLLGNNKVRAVAMSATDGLTRGMKVIDTGAPLSVPVGQATLGRIFNVLGEPVDNLGPINADKKSPIHEPAPAFTQLDTKLSIFETGIKVVDLLAPYRRGGKIGLFGGAGVGKTVLIMELINNIAKAHGGVSVFGGVGERTREGNDLYTEMKESKVINEQNISESKVALVYGQMNEPPGARMRVGLTALTIAEYFRDVNKQDVLLFIDNIFRFVQAGSEVSALLGRMPSAVGYQPTLSTEMGSLQERITSTREGSITSIQAVYVPADDLTDPAPATTFAHLDATTVLSRGLAAKGIYPAVDPLDSTSTMLQPWIVGEEHYETAQGVKKTLQRYKELQDIIAILGLDELSEEDRLTVARARKIERFLSQPFFVAEVFTGSPGKYVSLAETIKGFQMILSGELDNLPEQASYL

SEQ ID NO: 2226 - protein, 86 aa, Brassica rapa
  unsure (1)..(86): unsure at all Xaa locations
FLXPVIXFLVSKQSPLLLNSYPYFSYKDDMKDIPLEYALFKPTPPVIDGQYSYHNLFDAQLDAVYAALEKSGGGSLEVVVSESGWP

SEQ ID NO: 2227 - protein, 480 aa, Cercidiphyllum japonicum
  unsure (1)..(480): unsure at all Xaa locations
NLGRIAQIIGPVLDVAFPPGKMPNIYNALVVKGRDTVGQQINVTCEVQQLLGNNRVRAVAMSATDGLMRGMEVIDTGDPLSVPVGGATLGRIFNVLGEPVDNLGPVDTRTTSPIXRSAPAFIQLDTKLSIFETGIKVVDLLAPYRRGGKIGLFGGAGVGKTVLIMELINNIAKAHGGVSVFGGVGERTREGNDLYMEMKESGVINEQNIAESKVALVYGQMNEPPGARMRVGLTALTMAEYFRDVNEQDVLLFIDNIFRFVQAGSEVSALLGRMPSAVGYQPTLSTEMGSLQERITSTKEGSITSIQAVYVPADDLTDPAPATTFAHLDATTVLSRGLAAKGIYPAVDPLDSTSTMLQPRIVGEEHYEIAQRVKQTLQRYKELQDIIAILGLDELSEEDRLTVARARKIERFLSQPFFVAEVFTGSPGKYVGLAETIRGFQLILSGELDGLPEQAFYLVGNIDEATAKAMNLEMESKLKK

SEQ ID NO: 2228 - protein, 254 aa, Triticum aestivum
MDGGGTHRTPEDVFRDFRARRAGMIKALTTDVEKFYQQCDPEKENLCLYGLPNETWEVNLPAEEVPPELPEPALGINFARDGMDEKDWLSLVAVHSDAWLLAVAFYFGARFGFDKESRKRLFSMINNLPTIYEVVTGTAKKQVKEKHPKSSSKINKSGTKPSRQPEPNSRGPKMPPPPKDEDDSGGEEEEGEEHEKALCGACNDNYGQDEFWICCDACETWFHGKCVKITPAKAEHIKHYKCPNCSSSSKRARA

SEQ ID NO: 2229 - protein, 477 aa, Oenococcus oeni MCW
MKKTKIVSTLGPASNDLKIISALINNGINVARFNFSHGDHDEHAARMALVHDAEKKTGKLIGFMLDTKGAEIRTTVQDTPNGKIEFKKGDRLRISMNEKIKGTKEKIAVTYKGLYDDVKVGGKVLFDDGIIEMTVISKDSEKKELLVQVDNDGVLGGRKGVNAPGVAINLPGITKKDKSDIEFGLEQGIDFIAASFVRKAQDVLDIRKLLKKHHQENHVMIFPKIESQEGIDNFESIIAVSDGLMVPRGDMGVEIPYEEVPVIQKMMIRYMNRLGKPVITATQMLDSMIENPRATRAEINDVENAVWDGTDATMLSGESANGSWPVEAVKTMSTSDEYAENHVHDDGNRIDLRNEPKSSDTEVLAQAAVDAAREAGAKAIVASTASGYTARLISKYRPDMPILAITYDEKVARSLTVNYAVYPVVKDAPETTDDLIELAKKTVHDEKLAKRDDTIVVTAGLPIKKPGTTNLIHVVKL

SEQ ID NO: 2230 - protein, 288 aa, Desulfitobacterium hafniense
MSDRLETALAKARLKTPENPLGMGLITYLMAGDPDSDTTLRRLTGLVKAGVDILELGVPFSDPIADGPVIQAAGLRALQQGMNLQKVLNLAARFRKENQTTPLLLMSYLNPLIHYGYDRFLSEACTAGVDGLILPDLPWRESTPFRQRAYELLQDHLAFIPMIAQTSRPAHIHGLAQEQKGFIYVLSRNGITGGDAEIPPQTLQFIDSLQTALSAPCYVGFGIQSPTQVHTLSQACQGVIVGSALVQKFAQLDACALPAHELVHREQDIYAWIGSLRKTSVREELACE

SEQ ID NO: 2231 - protein, 527 aa, Yarrowia lipolytica
MIYTANSSPSTNLQGPSTLNTDDIPTKNYRKSSIIGTIAGLNIVRMNFSHGSYEYHQSVIENARESEQRFRGRPLAIALDTKGPEIRTGVTKDDKDWDVKAGHVMLFSTNPKYKDQCDDKIMYIDYTNIVKQIDIGKIIFVDDGVLSFKVLEKIDGETLKVETLNNGKISSRKGVNLPGTDVDLPALSEKDKADLKFGVEHGVDMIFASFVRTANDVQAIRDVLGEKGKGIQVISKIENQQGVNNFDEILKETDGVMVARGDLGIEIPAPQVFIAQKQLIAKCNLAGKPVICATQMLDSMTYNPRPTRAEVSDVGNAVLDGADCVMLSGETAKGTYPIESVKMMHETCLVAEKAIAYAPLFNEMRTLTVRPTETVETIAISAVSASFEQQARAIIVLSTSGTSARLCSKYRPNCPILMVTRNAQAARFSHLYRGVYPFIYHKARASNPAEWQHDVEERLKWGMDEAVALGILNKGDVVVAIQGWTGGLATPTLSEFSSVSKLFNTNLLDYKTYSMVIKSVNGGVLYK

SEQ ID NO: 2232 - protein, 242 aa, Staphylococcus aureus subsp. aureus MW2
MTKLFIPYIMGNKDLIENATLLSENGADIIEIGVPFSDPVADGPVIMEAGQQAIKQGITIDYIFNQLEKHGDQIKCNYVLMTYYNIICHYGEQAFFEKCRDTGVYGLIIPDLPYELSQRLKQQFSHYGVKIISLVAMTTDDKRIKDIVSHAEGFIYTVTMNATTGQNGAFHPELKRKIESIKAIANVPVVAGFGIRTPQHVADIKEVADGIVIGSEIVKRFKSNTREEIIKYLQSIQQTLNN

SEQ ID NO: 2233 - protein, 210 aa, Novosphingobium aromaticivorans
MVVATQMLESMIEAPTPTRAEVSDVANAVYDGADAVMLSAETAAGAWPEEAVTIMHRIAAQVEADPGYGARVHFLETLPDPTTADALAQAAASITETLPISGIIVFTGSGSTARRVARERPGVPMLVLTPSHKTARKVGLLWGAHAVSTKDIGSFEEMIAKGKRMALRHGFGSAGSKLVALAGVPFGTPGATNLLHVVTLTGDELTRHGE

SEQ ID NO: 2234 - protein, 459 aa, Xylella fastidiosa 9a5c
MPSKTDFTSSTMTPREIVQELDRHIVGQQAAKRSVAIALRNRWRRMQLPEELRNEVMPKNILMIGPTGVGKTEIARRLATLANAPFVKVEATRFTEVGYVGKDVEQIGRDLVDTAVKMYREQAKVRVRTQAEEYAEERILDVLLPRRSVGIGFDVDADVIRQEPSAHESETRAKFRRMLRSGELEEREIELDVAVNVSMDIMTPPGMEEMGQQLRQMFSNIGGGKSQKRKLTIKAARPLLIEEEAAKLVNEDEIRAAAIEACEQNGIVFIDEIDKVVKRGDTVGGGDVSREGVQRDLLPLVEGSNVSTKYGTIRTNHILFIASGAFHLTKPSDLIPELQGRFPIRVELDALSKADFIRILTEPKAALTKQYQELLKTEGVSLDFTEDAIDRIAEIAYLVNERQENIGARRLHTVLERLLEMLSYESPDRDGESVTVDADYVNAHLGELVKDPDLSRYIL

SEQ ID NO: 2235 - protein, 490 aa, Cuscuta japonica
MRINPPTYGSEISSIEKKNRGCIVQIIGPVLDVAFPPGKMPNIYNALVVKGRDTEQMNVTCEVQQLLGNNRVRAVAMNDTDGLMRGMEVIDTGTPITVPVGGSTLGRIFNVLGEPVDNFGPVDTNTTSTIHRSAPAFIQLDTKLSIFETGIKVVDFLAPYRRGGKIGLFGGAGVGKTVLIMELINNIAKAHGGVSVFGGVGERTREGNDLYMEMKESGVINENNITESKVALVYGQMNEPPGARMRVGLTALTMAEYFRDVNEQDVLLFIDNIFRFVQAGSEVSALLGRMPSAVGYQPTLSTEMGSLQERITSTKEGSITSIQAVYVPADDLTDPAPATTFAHLDATTVLSRGLAAKGIYPAVDPLDSTSMMLQPRIVGEEHYETAQKVKQTLQRYKELQDIIAILGLDELSEEDRLTVARARKIERFLSQPFFVAEVFTGSPGKYVGLAETIRGFNLILSGELDSLPEQAFYLVGNIDEATEKAMNLKT

SEQ ID NO: 2236 - protein, 343 aa, Triticum aestivum
SSSKLTLTKGNKSWSSTAVAAALELVDPPGCRNSARARFFVDNGTYLTEQGRFFLAWYSNNLIKHGDKILDEANKVFLGHRVQLAIKISGIHWWYKAPSHAAELTAGYYNLHDRDGYRPIARMLKRHHASLNFTCAEMRDSEQSSQAMSAPEELVQQVLSAGWREGLNMACENALPRYDPTAYNTILRNARPHGINKSGPPEHKLFGFTYLRLSNQLVEGQNYVNFKTFVDRMHANLPHDPCVDPVAPLQRSGPELTIEMILQAAQPKLEPFPFEEHTDLPVQGLGGIGGGEVEDPTGGMGGEVQQDPTGGMGGEVQQDPTGGMGGEVEDPTGGMGGELPPTV

SEQ ID NO: 2237 - protein, 509 aa, Bifidobacterium longum DJO10A
MSRLALVDWVPANGAIAPRTKLNKNRQAFMRKAKIVDTIGPSTEDYDNLLKLVEAGMDVARLNRSHGTPEDHLKVYNNVRKASEATGRNVAALVDLQGPKIRCGWFKKNADGEDKVQLQLGQEFVITTDDVEGDEHITSTTFKGLPGDCHPGDPILIDDGKVRLEVTKVEGNNVYTKVVVAGPVSSHKGINLPGVAVSLPALTEKDEADLRWAIRTGADVIAMSFVRFATDIDRAHEIMDEEGRRIPIIAKIEKPQALENLEEIVKTFDGVMAARGDMAVECPLEEVPLATKRIIELARQYAKPVIVATEVLGSMVNSPVPTRAEASDCANAILDGSDATMTSNETAVGKYPDVTVATMARISGYATDHGFDRIPELKNLDMSSTGAVSSAAVDLADKLNAKAIVAYTQTGATVHRVSRERPAAPIYGLTSNEHTYHWLALSWGTEAFLLKEDYHDKSRKDLMIYTDKVLKDAGKVADGDKIVILSSAQGEHQPGRTDSIYVHTVGACD

SEQ ID NO: 2238 - protein, 492 aa, Polygonatum hookeri
MRINPTTSGLRVPTLDEKNLGRIAQIIGPVLDVVFPPGKMPNIYNALVVKGRDTVGQQINVTCEVQQLLGNNRVRAVAMSATDGLTRGMEVIDTGAPLSVPVGGATLGRIFNVLGEPVDNLGPVDTRTTSPIHRSAPAFIQLDTKLSIFETGIKVVDLLAPYRRGGKIGLFGGAGVGKTVLIMELINNIAKAHGGVSVFGGVGERTREGNDLYMEMKESGVINEKNIAESKVALVYGQMNEPPGARMRVGLTALTMAEYFRDVNEQDVLLFIDNIFRFVQAGSEVSALLGRMPSAVGYQPTLSTEMGSLQERITSTKEGSITSIQAVYVPADDLTDPAPATTFAHLDATTVLSRGLAAKGIYPAVDPLDSTSTMLQPGIVGEEHYETAQKVKQTLQRYKELQDIIAILGLDELSEEDRLTVARARKIERFLSQPFFVAEVFTGSPGKYVGLAETVRGFQLILSGELDSLPEQAFYLVGNIDEATAKAMNLEM

SEQ ID NO: 2239 - protein, 260 aa, Streptococcus mutans UA159
MTKTLTKHLQAIKAEGKGLFIPYIMAGDHDKGLDGLFDTISFLEAQGVSAIEIGIPWSDPVADGPVIELAGQRSLVKGTSLASIIARLQEKKTQVPLVIMTYFNPVFQYGVETFVADLQNTSVKGLIIPDLPHEQESFIKPYLENLDLALVPLVSLTTGLERQKELIEDARGFVYAVAINGVTGKTGNYRDDLDKHLKHLTEIAQIPVLTGFGVSTLADIKRFNQVSDGVIVGSKIVKGLHEGMQEEIKDFIYAGSHYQK

SEQ ID NO: 2240 - protein, 491 aa, Flagellaria indica
TSSSGVSTIEEKNKGSIIQIIGPVLDVNFPSGKLPNIYNALVVKGRDTVGHQINVTCEVQQLLGNNRVRAVAMSATDGLTRGMEVIDTGAPLSVPVGGATLGRIFNVLGEPVDNLGPVDTSATSPIHRSAPAFIELDTKLSIFETGIKVVDLLAPYRRGGKIGLFGGAGVGKTVLIMELINNIAKAHGGVSVFGGVGERTREGNDLYKEMKESGVINEKNIAESKVALVYGQMNEPPGARMRVGLTALTMAEYFRDVNKQNVLLFIDNIFRFVQAGSEVSALLGRMPSAVGYQPTLSTEMGSLQERITSTKKGSITSIQAVYVPADDLTDPAPATTFAHLDATTVLSRVLAAKGIYPAVDPLDSTSTMLQPRIVGDEHYEIAQRVKETLQRYKELQDIIAILGLDELSEEDRLTVARARKIERFLSQPFFVAEVFTGSAGKYVGLAETIRGFQLILSGELDGLPEQAFYLVGNIDEATAKAMNLEGENKLK

SEQ ID NO: 2241 - protein, 489 aa, Saccellium lanceolatum
GFGVSTLEKKNLGRIVQIIGPVLDVAFPPGKMPNIYNALVVKGRDTVGQPINVTCEVQQLLGNNRVRAVAMSATDGLTRGMEVIDTGAPLSVPVGGATLGRIFNVLGEPVDNLGPVDTRTTSPIHRPAPAFIQLDTKLSIFETGIKVVDLLAPYRRGGKIGLFGGAGVGKTVLIMELINNIAKAHGGVSVFGGVGERTREGNDLYMEMKESGVINEENIAESKVALVYGQMNEPPGARMRVGLTALTMAEYFRDVNEQDVLLFIDNIFRFVQAGSEVSALLGRMPSAVGYQPTLSTEMGSLQERITSTKAGSITSIQAVYVPADDLTDPAPATTFAHLDATTVLSRGLAAKGIYPAVDPLDSTSTMLQPRIVGEEHYETAQRVKQTLQRYKELQDIIAILGLDELSEEDRLTVARARKIERFLSQPFFVAEVFTGSPGKYVGLAETIRGFQLILSGELDGLPEQAFYLVGNIDEATAKAMNLEMESNLK

SEQ ID NO: 2242 - protein, 482 aa, Eucryphia lucida
  unsure (1)..(482): unsure at all Xaa locations
SPGVSALEKKNLGRIAQIIGPVLDVAFPPGKMPNIYNALVVKGRDTVGQQINVTCEVQQLLGNNRVRAVAMSATDGLMRGMEVIDTGAPLSVPVGGATLGRIFNVLGEPIDNLGPVDTRTTSPIHRSAPAFIQLDTKLSIFETGIKVVDLLAPYRRGGKIGLFGGAGVGKTVLIMELIXNIAKAHGGVSVFGGVGERTREGNDLYMEMKESGVINEENIAESKVALVYGQMNEPPGARMRVGLTALTMAEYFRDVNEQDVLLFIDNIFRFVQAGSEVSALLGRMPSAVGYQPTLSTEMGSLQERITSTKEGSITSIQAVYVPADDLTDPAPATTFAHLDATTVLSRGLAAKGIYPAVDPLDSTSTMLQPRIVGEEHYETAQRVKQTLQRYKELQDIIAILGLDELSEEDRLTVARARKIERFLSQPFFVAEVFTGSPGKYVGLAETIRGFKLILSGELDGLPEQAFYLVGNIDEATAKATNL

SEQ ID NO: 2243 - protein, 438 aa, Oryza sativa
MCTYQILDLLKIQGPEIRTGFLKDGKPVQLKKGQEITVSTDYSIKGDDNMISMSYKKLAVDLKPGSVILCADGTITLTVLHCDKEQGLVRCRCENTAMLGERKNVNLPGVIVDLPTLTEKDKEDILKWGVPNKIDMIALSFVRKGSDLVEVRKVLGKHAKSIMLMSKVENQEGVANFDDILAQSDAFMVARGDLGMEIPIEKIFYAQKVMIFKCNIQGKPVVTATQMLESMIKSPRPTRAEATDVANAVLDGTDCVMLSGETAAGAYPELAVRTMAKICLQAESCVDHAAVFKSITASAPIPMSPLESLASSAVRTANSAKAALILVLTRGGTTARLVAKYRPSMPILSVVVPELKQTDSFDWTCSDEAPARHSLIVRGVIPMLSAATAKAFDNEATEEALGFAISNAKAMGLCNSGESVVALHRIGTASVIKLLTAN

SEQ ID NO: 2244 - protein, 696 aa, Triticum aestivum
  unsure (1)..(696): unsure at all Xaa locations
MSSPRLLLKGYPEPRSILRTRIPAYHYAPAAQRFSPAPPLLARPLWAADRGRAWARSLRGRRGFGRAGVPRRHARRMHSEDLESAFDMAGLADTHFEYSPEARAQADLKFTYVVTCQIYRVQNGEGKPEAADIALLMQRNEALRIAYIDVVESVKNGKPSTEYYSKLVKADIHGKDKEIYSVKLPGNPKLGEGKPENQNHAVIFTRGNAVQTIDMNQDNYFEEALKMRNLLEEFSQNHGKFRPSILGVREHVFTGSVSSLASFMSNQETRFCDIRXRRVLSNPLKVRMHYGHPDVFDRIFHITRGGISKXASRIINISEDIFAGFNSTLRQGNITHHEYIQVGKGRDVGLNQIALFEGKVAGGNGEQVLSRDIYRLGQLFDFFRMLSFYVTTVGFYFCTMLTVLTVYIFLYGKTYLALSGVGESIQNRADIQGNKALSVALNTQFLFQIGVFTAIPMILGFILEEGVLTAFVSFITMQFQLCSVFFTFSLGTRTHYFGRTILHGGAKYRATGRGFVVRHIKFAENYRLYSRSHFVKGLEVALLLVIFLAYGFNNSGAIGYILLSISSWFMALSWLFAPYVFNPSGFEWQKVVEDFRDWTNWLXFYRGGIGVKGEESWEAWWDEELAHIHTFRGRIMETILSLRFFIFQYGVVYHMKASQXSTALSVYWVSWAVLGGLFVLLMVFSLNPKAMVHFQL

SEQ ID NO: 2245 - protein, 422 aa, Saccharomyces castellii
PHYAERILLSLREIIREDDQFSRVTLLEYLKQLHPVEWDCFVKDTKILAEETAAYEGNEDDGEKDGGLKAQIDDLPFYCIGFKSAAPEYTLRTRIWASLRFQTLYRTVSGFMNYSRAIKLLYRVENPEIVQMFGGNAEGLEKELEKMARRKFKFLVSMQRLAKFKPHELENAEFLLRAYPDLQIAYLDEEPPLNEGEEPRIYSALIDGHCEILENGRRRPKFRVQLSGNPILGDGKSDNQNHALIFYRGEYIQLIDANQDNYLEECLKIRSVLAEFEELNVEQVNPYAPDLKYEEQVTNHPVAIVGAREYIFSENSGVLGDVAAGKEQTFGTLFARTLSQIGGKLHYGHPDFINATYMTTRGGVSKAQKGLHLNEDIYAGMNALLRGGRIKHCEYYQCGKGRDLGFGTILNFTTKIGAGMGE

SEQ ID NO: 2246 - protein, 484 aa, Bonamia media
TSDSEVSAVEKKNLGRIVQIIGPVLDVAFPPGKMPKIYNALVVQGQDKEQTDVTCEVQQLLGNNRVRAVAMSDTNGLKRGMQVIDTGAPISVPVGGSTLGRIFNVLGEPVDNLGPVDTNTTSPIHRSAPAFIQLDTKLSIFETGIKVVDLLAPYRRGGKIGLFGGAGVGKTVLIMELINNIAKAHGGVSVFGGVGERTREGNDLYMEMKESGVINEENIAESKVALVYGQMNEPPGARMRVGLTALTMAEYFRDVNEQDVLLFIDNIFRFVQAGSEVSALLGRMPSAVGYQPTLSTEMGSLQERITSTKEGSITSIQAVYVPADDLTDPAPATTFAHLDATTVLSRGLAAKGIYPAVDPLDSTSTMLQPGIVGEEHYETAQRVKQTLQRYKELQDIIAILGLDELSEEDRLTVARARKIERFLSQPFFVAEVFTGSPGKYVGLAETIRGFQLILSGELDGLPEQAFYLVGNIDEATAKAMNLKT

SEQ ID NO: 2247 - protein, 284 aa, Arabidopsis thaliana
FLQLLQISYFPENHFPKKNKTFPFVLLPPTAITAYQSELGGDSSPLRKSGRGKIEIKRIENTTNRQVTFCKRRNGLLKKAYELSVLCDAEVALIVFSSRGRLYEYSNNSVKGTIERYKKAISDNSNTGSVAEINAQYYQQESAKLRQQIISIQNSNRQLMGETIGSMSPKELRNLEGRLERSITRIRSKKNELLFSEIDYMQKREVDLHNDNQILRAKIAENERNNPSISLMPGGSNYEQLMPPPQTQSQPFDSRNYFQVAALQPNNHHYSSAGRQDQTALQLV

SEQ ID NO: 2248 - protein, 488 aa, Aextoxicon punctatum
GPGVSTLEKKNLGRFAQIIGPVLDVAFPRGKMPNIYNALVVKSRDTVGQPINVTCEVQQLLGNNRVRAVAMSATDGLTRGMEVIDTGAPLSVPVGGATLGRIFNVLGEPVDNLGPVDTRTTSPIHRSAPAFIQLDTKLSIFETGIKVVDLLAPYRRGGKIGLFGGAGVGKTVLIMELINNIAKAHGGVSVFGGVGERTREGNDLYMEMKESGVINEQNIAESKVALVYGQMNEPPGARMRVGLTALTMAEYFRDVNEQDVLLFIDNIFRFVQAGSEVSALLGRMPSAVGYQPTLSTEMGSLQERITSTKEGSITSIQAVYVPADDLTDPAPATTFAHLDATTVLSRGLAAKGIYPAVDPLDSTSTMLQPRIVGEEHYETAQRVKQTLQRYKELQDIIAILGLDELSEEDRLTVARARKIERFLSQPFFVAEVFTGSPGKYVGLAETIRGFQLILSGELDGLPEQAFYLVGNIDEATAKAMNLEMENKL

SEQ ID NO: 2249 - protein, 468 aa, Arabidopsis thaliana
MKKEETPKKRLVTKEEDAERLLKDNPSLLNERNPVMYHTPLHVSAGNGNVDIVKYLLAWTGSDKVELEAMNTYGETPLHMAAKNGCNEAAKLLLESGAFIEAKASNGMTPLHLAVWYSITAKEISTVKTLLDHNADCSAKDNEGMTPLDHLPQGQGSEKLRELLRWFLQEQRKRSALEQCGKTKAKMELLEDELSNIVGLSELKTQLRKWAKGMLLDERRRALGLNIGTRRPPHMAFLGNPGTGKTMVARVLGKLLNTVGILPTDKVTEVQRTDLVGEFVGHTGPKTRRKIQEAEGGILFVDEAYRLIPMQKADDKDYGLEALEEIMSVMDTGKIVVIFAGYSEPMKRVIASNEGFCRRVTKFFNFSDFSAKELAQILHIKMNNQGEDTLFYGFRLHESCTLQEIASLIEAETTEKQRKEMNGGLVDTLLVNARENLDLRLSFECVDTEEICTIKLEDLEAGLRVFSQ

SEQ ID NO: 2250 - protein, 785 aa, Oryza sativa (japonica cultivar-group)
MWKLKIAEGGPWLKSGNSHVGRETWEFDPNFGTSEEREAVEAARIEFQKNRFRTRHTSDVLARMQLAKANNFSIDLQKEKDGNPINIDTATVSDILKKALSYFSAIQAYDGHWPGDFPGPLFTTATMIIVLYVTESLTITLSSEHHKEICRYLYNRQNIDGGWGLHAEGESSMLSTALNYTALRLLGENVDDGPDISMHKARKWIHDHGGATMIPILGKVWLSVLGVFDWSGVNPIPPELFLLPSFVPIQPGRLWSHFRMAFIPMSYLYGKKFVGPITRLVISLREELHIHPYKKIDWKEARKLCAKEDAYNPHMWLQECLSDCLYSFGEPFLTRWPISYMRKRALYQIAEFLKYEDENSQYICIGAAQKALSMLCCWIENPNSDAFKRHLARVADFLWVGEDGMKVRVCAGQLWDVAFAVQAILACSIAEEFGSTLKKAHGFIKTSQIMDNPSGDFSRKYRHISKGGWAFQVADQGWQVSDCTAEALKALLLLSKCLSDGADYQMETYCYFDAVNVLLSLQNPNGGYGAWELARTYPWMEIFNMTEIYADIIVEHQYVECTSSVIQALALFREKYPGHRKDEIDQCIRKATEFIEKLQNDDGSWFGSWGICFTYGTWFAIEGLSAVGQCYDDSTCIRKACKFLLSKQLTNGGWGESHLSSRTKAYTNLDGEKSHIVNTAWAMLALMKAGQVERDPAPLHKAARLIMSMQLSDGDFPQEEMIGSFLKNGPLCYMAYRNIFPIWALGEYQKLVFQNYQTSSIKQTNIAPSAGNAALKNSASTTAPT

SEQ ID NO: 2251 - protein, 498 aa, Oenothera elata subsp. hookeri
MRINPTTSGPGVSTLEKKKSGRIAQIIGPVLDVTFPPGKMPNIYNALVVKGRDTGGQEINVTCEVQQLLGNNRVRAVAMSATDGLTRGMEVIDTGAPLSVPVGEATLGRIFNVLGELVDELGPVDTRTTSPIHRSATAFIQLDIELSIFETGIKVVDLLAPNRRGGKIGLFGGAGVGKTVLIMELINNIAKAHGGVSVFGGVGERTREGNDLYMEMKESGVINEQNIAESKVALVYGQMNEPPGARMRVGLTAVRVADYFRDVNKQNVLLFIDNIFRFVQAGSEVSALLGRMPSAVGYQPTLSTEMGSLQERITSTKAGSITSIQAVYVPADDLTDPAPATTFAHLDATTVLSRGLAAKGIYPAVDPLDSTSTMLQPRIVGDEHYETAQRVKETLQRYKELQDIISILGLDELSEEDRLTVARARKIERFLSQPFFVAEVFTGSPGKYVGLAETIRGFKLILSGELDGLPEQAFYLVGTIDEATAKAANLEMESDLKK

SEQ ID NO: 2252 - protein, 502 aa, Lactococcus lactis subsp. lactis
MNKRVKIVSTLGPAVEIRGGKKFGESGYWGESLDVEASAKNIAALIEEGANVFRFNFSHGDHPEQGARMATVHRAEEIAGHKVGFLLDTKGPEMRTELFTDGADSISVVTGDKFRVATKQGLKSTPELIALNVAGGLDIFDDVEIGQTILIDDGKLGLSLTGKDAATREFEVEAQNDGVIGKQKGVNIPNTKIPFPALAERDDADIRFGLSQPGGINFIAISFVRTANDVKEVRRICEETGNPHVQLLAKIENQQGIENLDEIIEAADGIMIARGDMGIEVPFEMVPVYQKLIISKVNKAGKIVVTATNMLESMTYNPRATRSEISDVFNAVIDGTDATMLSGESANGKYPRESVRTMATVNKNAQTMLKEYGRLHPERYDKSTVTEVVAASVKNAAEAMDVKLIVALTESGNTARLISKHRPDADILAITFDEKVERGLMINWGVIPMMTEKPASTDDMFEVAEKVALASGLVEAGDNIIIVAGVPVGTGRTNTMRIRTVK

SEQ ID NO: 2253 - protein, 242 aa, Shigella boydii
MKERKEGAFVPFVTLGDPGIEQSLKIIDTLIEAGADALELGIPFSDPLADGPTIQNATLRAFAAGVTPAQCFEMLALIRQKHPTIPIGLLMYANLVFNKGIDEFYAQCEKVGVDSVLVADVPVEESAPFRQAALRHNVAPIFICPPNADDDLLRQIASYGRGYTYLLSRAGVTGAENRAALPLNHLVAKLKEYNAAPSLQGFGIFRPDQVKAAIDARAAGAIFGSAIVKIIEQHINEPEKML

SEQ ID NO: 2254 - protein, 447 aa, Methanocaldococcus jannaschii
MVGMMRKTKILVTLGPSLENKLDKAINLIDGVRFNMSHATTDYCEKFLNILEKNNIAKVMDLKGIKIRIKEVKLKNKILKMGEKVVIGEDIKLNYNIDTIEEGHFILINDGKIKLRVVEKTDKIIAVVEVGGEIKEGMGVNLPDTRIELPIIDETDLKNIKFAVEKDFEYIALSFVRNKEDVKELKDIISEYKGDCEVISKIETKEGLKNIKEIARESDGVMVARGDLGVEVPIENIPIEQKNILRIANRYGILSITATQILDSMINNPFPTRAEVTDIANAIYDGTDCLMLSNETTIGKYPIEAIKVLNKVAKVADEHYEEFGDRVCLEVESIDEGLVYAVYELYKKLNTKLVITPTYSGRTAKLISKLRINSKIIAPTPNIRTLKRLRLVWGVESCLMEEFDDMEKIINTCREMAKKEIGKGIYLITLGHPIGQKKTNTIKVESI

SEQ ID NO: 2255 - protein, 631 aa, Oryza sativa
  unsure (1)..(631): unsure at all Xaa locations
MEAGAGSSSAKLVAACVIGGIVLGASVVALHLAGPVAIPALPPVDALRRRFRRGRRRPVRVYMDGCFDMMHYGHCNALRQARALGDELIVGVVSDHEITANKGPPVTPLHERLIMVRAVKWVHDVIPDAPYAITEDFMNKLFNEYNIDYIIHGDDPCLLPDGTDAYALAKKVGRFKQIKRTEGVSTTDIVVNKLXGRMLLCVRERSASDSHNHSSLQRQFSHGHGQKIDDSGSXXGPGPDSRIVYIDGAFDLFHAGHVEILRLARELGDFLLVGIHTDQTISSTRGPHRPIMNLHERSLSVLACRYVDEVIIGAPWDVSKDMELLDATAIIEHGTTMHAQXSKIEHDIYATPAAMGIYRRLESPLDITTSTIIRRIVANHEAYQSVVLLLQKRNEKKEASEKKYYDSKSFVNGDSGNFRCNPDDGADLGDAGDPIFLYMGLCGCQYQLCYFEMELSKLATMCGHALAGLINSLIAYLSLLIHHKEVRSRYRPIASHVVTTTTCYGCTADRLPPMVLLTVTPEKFHTVTFRFTAYITPVFSLSGNSLEPLWRSGGDFPAVATSPATMSTSAGPFAAPSAEFPENLSHQIAIPSLVHPNQYFLGPIDNLDPTEFINAETNRIPFRLANPNLSL

SEQ ID NO: 2256 - protein, 482 aa, Schima superba
SGASVLEKKNLGRIVQIIGPVLDVAFPPGKMPNIYNALVVKGRDTVGQPINVTCEVQQLLGNNRVRAVAMSATDGLTRGMEVIDTGAPLSVPVGGATLGQIFNVLGEPVDNLGPVDTRTTSPIHRSAPAFIQLETKLSIFETGIKVVDLLAPYRRGGKIGLFGGAGVGKTVLIMELINNIAKAHGGVSVFGGVGERTREGNDLYMEMKESGVINEQNIAESKVALVYGQMNEPPGARMRVGLTALTMAEYFRDVNEQDVLLFIDNIFRFVQAGSEVSALLGRMPSAVGYQPTLSTEMGSLQERITSTKEGSITSIQAVYVPADDLTDPAPATTFAHLDATTVLSRGLAAKGIYPAVDPLDSTSTMLQPRIVGEEHYETAQRVKQTLQRYKELQDIIAILGLDELSEEDRLTVARARKIERFLSQPFFVAEVFTGSPGKYVGLAETIRGFQLILSGELDGLPEQAFYLVGNIDEATAKAMNLE

SEQ ID NO: 2257 - protein, 268 aa, Vibrio cholerae
MNRYQALFQRLSAAQQGAFVPFVTIGDPNPEQSLAIMQTLIDAGADALELGMPFSDPLADGPTIQGANLRALAAKTTPDICFELIAQIRARNPETPIGLLMYANLVYARGIDDFYQRCQKAGVDSVLIADVPTNESQPFVAAAEKFGIQPIFIAPPTASDETLRAVAQLGKGYTYLLSRAGVTGAETKANMPVHALLERLQQFDAPPALLGFGISEPAQVKQAIEAGAAGAISGSAVVKIIETHLDNPAKQLTELANFTQAMKKATKI

SEQ ID NO: 2258 - protein, 489 aa, Haloragis erecta
  unsure (1)..(489): unsure at all Xaa locations
PGVXALEKKNQGRITQIIGPVLDVAFPPGXMPNIYXALVVKGRDTAGQQINVTCEVQQLLGNNRVRAIAMSATDGLTRGMEVIDTGAPLSVPVGGVTLGRIFNVLGEPVDNLGPVDTRTISPIHRSAPAFIQLDTKLSIFETGIKVVDLLAPYRRGGKIGLFGGAGVGKTVLIMELINNIAKAHGGVSVFGGVGERTREGNDLYMEMKESGVINEQNIAESKVALVYGQMNEPPGARMRVGLTALTMAEYFRDVNEQDVLLFIDNIFRFVQAGSEVSALLGRMPSAVGYQPTLSTEMGTLQERITSTKEGSITSIQAVYVPADDLTDPAPATTFAHLDATTVLSRGLAAKGIYPAVDPLDSTSTMLQPRIVGEEHYEIAXRVKQTLQRYKELQDIIAILGLDELSEEDRLTVARARKIERFLSQPFFVAEVFTGSPGKYVGLSETIRGFQLILSGNFDGLPEQAFYLVGNIDEAAAKAMKLEMESNLKK

SEQ ID NO: 2259 - protein, 507 aa, Oryza sativa (japonica cultivar-group); identical to SEQ ID NO: 1576

SEQ ID NO: 2260 - protein, 430 aa, Borrelia burgdorferi B31
MARVKGQKVKECSFCGLSVAELGGNVVISNGVAICPECSKICHNLFKEKLCKPLDSKSNGLPTPKQLKDHLDMYVVGQEDAKKVLSVAVYNHYKRILKNNKYDNGIEIEKSNILLVGPTGSGKTLLAKTLAAEMNVPFAIADATTLTEAGYVGEDVENILLKLIHAAHGDVSLAEKGIIYIDEIDKIAKKNENVSITRDVSGEGVQQALLKIIEGTVANVPPRGGRKHPYEDTIEINTQNILFICGGAFVGLENIVKNRINKSSIGFSAIEKKNIREDTSLKYLEMEDLIKFGLIPEFVGRLPVHSYLEKLNKEDLLRILVDPQNSIVKQYYHMFKMDNVELVFEKDALESIVDEAILKNTGARGLRSILEGLLKDVMFEVPSISKAKKVVVTKESVLNADVNPLILVGNAIKKPWAKELYEINLKYDKK

SEQ ID NO: 2261 - protein, 498 aa, CAJOPHORA ACUMINATA
  unsure (1)..(498): unsure at all Xaa locations
XXINPTTSGPGISTLEKKNLGRIAQIIGPVLDVAFPPGKMPNIYNALVVKGRDTVGQPINVTCEVQQLLGNNRVRAVAMSATDGLMRGMEVLDTGAPLSVPVGGATLGRIFNVLGEPVDNLGPVDTRTTSPIHRSAPAFIQLDTKLSIFETGIKVVDLLAPYRRGGKIGLFGGAGVGKTVLIMELINNIAKAHGGVSVFGGVGERTREGNDLYMEMKESGVINEQNIAESKVALVYGQMNEPPGARMRVGLTALTMAEYFRDVNEQDVLLFIDNIFRFVQAGSEVSALLGRMPSAVGYQPTLSTEMGSLQERITSTKEGSITSIQAVYVPADDLTDPAPATTFAHLDATTVLSRGLAAKGIYPAVDPLDSTSTMLQPRIVGEEHYETAQRVKQTLQRYKELQDIIAILGLDELSEEDRLTVARARKIERFLSQPFFVAEVFTGSPGKYVGLAETIRGFQLILSGEFDGLPEQAFYLVGNIDEATAKAMNLEMESNLKK

SEQ ID NO: 2262 - protein, 237 aa, Cichorium intybus x Cichorium endivia
GVCYGRVEGLSSQQDVVNLYKNNSITRMRIYQPNQAILQGLKGTNIELVIGIPNDALESLNSQNTANTWVRDNIQNYPDVRFRYVAVGNEVDPDNGNSQYVNFVLPAMQNVQNAINAASLGNQIEVSTATYSGLLGASYPPSNGAFRDTASEFIEPIVKFLSENNSPMLVNIYPYFASIGNPNSNLPYALFTAPGTILSDNGRRYSNLFDAIIDAHYAAQASLGGENVEIVVSESGC

SEQ ID NO: 2263 - protein, 229 aa, Glycine max
MDNQKKGKGGDQPKKLAKVLNTSSLQINEKDAFQLVGSIVEKGISDSHNNPTTTPPFHFFPKPTVLPFPVARHRSHGPHWRPLSSRGDDDGEDDDSDNNVKDEEDKNLQEFEKVSAFAKPVQRRRKKGLDFRKWKEITRDDSSSFGKESEKDVSSFSQTTGKKKNEKGSKSTYKKTSSLDDNVISPMKVDTKPLLDNSDGGFINSTTTMEVDTLNKVDHEEKVKHAQNL

SEQ ID NO: 2264 - protein, 241 aa, Populus balsamifera subsp. trichocarpa
MEYQNESLESSPLRKLGRGKVEIKRIENTTNRQVTFCKRRSGLLKKAYELSVLCDAEVALIVFSSRGRLYEYSNDSVKSTIERYKKASADSSNTGSVSEANAQYYQQEAAKLRSQIGNLQNSNRHMLGEALSSLSVKELKSLEIRLEKGISRIRSKKNELLFAEIEYMQKREVDLHNNNQLLRAKISENERKRQSMNLMPGGADFEIVQSQPYDSRNYSQVNGLQPASHYSHQDQMALQLV

SEQ ID NO: 2265 - protein, 402 aa, Mougeotia sp. UTEX LB 758
LLGDNKVRAVAMSATDGLMRGMDVIDTGAPLSVPVGEATLGRIFNVLGEPVDNLGPVNNKTTLPIHRSAPAFTQLDTKLSIFETGIKVVDLLAPYRRGGKIGLFGGAGVGKTVLIMELINNIAKAHGGVSVFAGVGERTREGNDLYIEMKESKVINEENIGESKVALVYGQMNEPPGARMRVGLTALTMAEYFRDINKQDVLLFIDNIFRFVQAGSEVSALLGRMPSAVGYQPTLSTEMGSLQERITSTKEGSITSIQAVYVPADDLTDPAPATTFAHLDATTVLSRGLAAKGIYPAVDPLDSTSTMLQPWIVGTEHYEIAQAVKETLQRYKELQDIIAILGLDELSEEDRLVVARARKVERFLSQPFFVAEVFTGSPGKYVSLAESIKGFQLILQGELDKL

SEQ ID NO: 2266 - protein, 382 aa, Treponema denticola
IRDLMAVGYTMVKSEMQEKLKEQAEKNTEESLLDLLLPGSNKKKTAATSAQPQDVSQASSGTTISLPSVSSTAQAEEHKAQNENDMSGTREKFRVMLRENKLEDKMVEVTISPSMGTPTFEFFAGGSNMEDIESAMSNISSMLMGGRKSKRKNVSVKEAREIIMAEQLDRMVDHDKVTDEAKQRVEQMGIIFIDEIDKVASRSDRGGGPDVSREGVQRDILPIVEGSKVSTKYGVVDTRHILFIAAGRFSVSKPSNLIPEFQGRFPLRVELEALHAEDFKRILLEPKNALTKQYAELLETEGVKIEFLDEAIDRMSFLAADVNSKNENIGARRLHTIMEMLLEDISFNASEMGGETVKIDVAYVDERLKDIVQDQDLSRYIL

SEQ ID NO: 2267 - protein, 476 aa, Cneorum pulverulentum
VSALAKKNLGHIAQIIGPVLDVAFPPGKMPNIYNALVVKSRDTVGQPINVTCEVQQLLGNNRVRAVAMSATDGLMRGMEVIDTGAPLSVPVGGATLGRIFNVLGEPVDNLGPIDTRTTSPIHKSAPAFIQLDTKLSIFETGIKVVDLLAPYRRGGKIGLFGGAGVGKTVLIMELINNIAKAHGGVSVFGGVGERTREGNDLYMEMKESGVINEQNIAESKVALVYGQMNEPPGARMRVGLTALTMAEYFRDVNEQDVLLFIDNIFRFVQAGSEVSALLGRMPSAVGYQPTLSTEMGSLQERITSTKEGSITSIQAVYVPADDLTDPAPATTFAHLDATTVLSRGLAAKGIYPAVDPLDSTSTMLQPRIVGEDHYETAQRVKQTLQRYKELQDIIAILGLDELSEEDRLTVARARKIERFLSQPFFVAEVFTGSPGKYVGLAETIRGFKLILSGEFDGLPEQAFYLVGNIDEVTAKA

SEQ ID NO: 2268 - protein, 500 aa, Streptococcus thermophilus
MNKRVKIVATLGPAVEIRGGKKFGEDGYWSEKLDPDASAKNIAQLIEEGANVFRFNFSHGNHAEQGERMDVVRMAESIAGQKVGFLLDTKGPEIRTELFEGDAKEYAYKTGEQIRIATKQGLKSTRDVIALNVAGALDIFDDVEVGKQVLVDDGKLGLRVVDKDAEKREFIVEVENDGIIAKQKGVNIPYTKIPFPALAERDNADIRFGLEQGINFIAISFVRTAKDVQEVRAICEETGNGHVKLLAKIENQQGIDNIDEIIEAADGIMIARGDMGIEVPFEMVPVYQKMIITKVNAAGKIVVTATNMLETMTEKPRATRSEVSDVFNAVIDGTDATMLSGESANGPYPVESVRTMATIHKNAQTLLKEYGRLNSSTFDRSSNTEVVASAVKDATNSMHIQLIVALTESGNTASLIDTYRPEADIWAITFDELTQKSLMLNWGVIPVVTETPSSTDDMFEVAERVALESGLVESGDNIVIVAGVPVGSGNTNTMRIRTVK

SEQ ID NO: 2269 - protein, 498 aa, Philadelphus lewisii
  unsure (1)..(498): unsure at all Xaa locations
XXINPTTSGPWISTLEKKNLGRIAQIIGPVLDVAFPPGKMPNIYNALVVKGQDTAGQPINVTCEVQQLLGNNRVRAVAMSATDGLMRGMEVIDTGAALSVPVGGATLGRIFNVLGEPVDNLGPVDTRTTSPIHRSAPAFIQLDTKLSIFETGIKVVDLLAPYRRGGKIGLFGGAGVGKTVLIMELINNIAKAHGGVSVFGGVGERTREGNDLYMEMKESGVINEQNIAESKVALVYGQMNEPPGARMRVGLTALTMAEYFRDVNEQDVLLFIDNIFRFVQAGSEVSALLGRMPSAVGYQPTLSTEMGSLQERITSTKEGSITSIQAVYVPADDLTDPAPATTFAHLDATTVLSRGLAAKGIYPAVDPLDSTSTMLQPRIVGEEHYETAQRVKETLQRYKELQDIIAILGLDELSEEDRLTVARARKIERFLSQPFFVAEVFTGSPGKYVGLAETIRGFQLILSGELDGLPEQAFYLVGNIDEATAKAMNLEMESNLKK

SEQ ID NO: 2270 - protein, 435 aa, Ephedra intermedia
  unsure (1)..(435): unsure at all Xaa locations
SFPLGNLPNIYNSLIVKGQIGSKEINITCEVQQLLGNNTVRTVAMSATDGLMRGMKVIDTGAPLSVPVGKMTLGRIFNVLGEPVDNLGPIDTSTTFPIHRPAPAFSQLDINLAIFETGIKVVDLLAPYRRGGKIGLFGGAGVGKTVLIMELINNIAKAHGGVSVFGGVGERTREGNDLYMEMKESGVINEKNITESKVALVYGQMNEPPGARMRVGLTALTMAEYFRDVNEQDVLLFIDNIFRFVQAGSEVSALLGRMPSAVGYQPTLSTEMGSLQERITSTKKGSITSIQAVYVPADDLTDPAPATTFAHLDATTVLSRGLAAKGIYPAVDPLDSTSTMLQPRXXGEXHYEIAQEVKQTLQRYKELQDIIAILGLDELSEEDRXXXXRARKIERFLSQPFFVAEVFTGSPGKYVSLIETTRGFQMILAGDLDGL

SEQ ID NO: 2271 - protein, 447 aa, Thermobifida fusca
MSGSQESGKEACDGTADVLRSGWVARIGDGGDLLKCSFCGKSQKQVKRLIAGPGVYICDECIDLCNEIIEEEFADATELKWDNLPKPREIYEFLDSYVVGQEQAKKALSVAVYNHYKRIRSGGDRSRDDDVEIAKSNILLLGPTGSGKTLLAQTLAKILKVPFAIADATALTEAGYVGEDVENILLKLIQAADYDVKKAETGIIYIDEVDKVARKSENPSITRDVSGEGVQQALLKILEGTTASVPPQGGRKHPHQEFIQIDTTNVLFICGGAFSGLEKIIEARTGRQGMGFNAVVRSKKELENSDPFRDVMPEDLLKFGMIPEFVGRLPVITSVHNLDRNALIRILTEPRNALVKQYQRLFELDNVELQFTQDALEAIADQAIMRGTGARGLRAIIEEVLLSVMYEVPSRKDVARVIITREAVLEHVYPTIVPRALPPKEREEKTA

SEQ ID NO: 2272 - protein, 490 aa, Ercilla volubilis
  unsure (1)..(490): unsure at all Xaa locations
NPXXXXXGVSXXEKKNXGGVCQIIGPVXDVAFXPGKMPNIXNALVVXGRDTVGQPINVXCEVQQLLGNNRVRAVAMSATDVLTRGMEVIDTGAPLSVPVGGATLGRIFNVLGEPVDNLGPVDTRTTSPIHRSAPAFTQLDTKLSIFETGIKVVDLLAPYRRGGKIGLFGGAGVGKTVLIMELINNIAKAHGGVSVFGGVGERTREGNDLYMEMKESGVINEQNIAESKVALVYGQMNEPPGARMRVGLTALTMAEYFRDVNEQDVLLFIDNIFRFVQAGSEVSALLGRMPSAVGYQPTLSTEMGSLQERITSTKEGSITSIQAVYVPADDLTDPAPATTFAHLDATTVLSRGLAAKGIYPAVDPLDSTSTMLQPRIVGEEHYETAQRVKQTLQRYKELQDIIAILGLDELSEEDRLTVARARKIERFLSQPFFVAEVFTGSPGKYVGLAETIRGFQLILSGELDGLPEQAFYLVGNIDEATAKGMNLEME

SEQ ID NO: 2273 - protein, 482 aa, Xyris involucrata
  unsure (1)..(482): unsure at all Xaa locations
KNIGRIAQIIGPVLDVXFPXGKMPNIYNALIVKGRDTXGQXINVTCEVQQLLGNNRVRAVAMSATDGLXRGMEVIDTGAPLSVPVGXVTLGRIFNVLGEPVDNLGPVDTSTTSPIHRSAPTFIELETRLEIFETGIKVVDLLAPYRRGGKIGLFGGAGVGKTVLIMELINNIAKAHGGVSVFGGVGERTREGNDLYVEMKESGVINEKNLTESKVALVYGQMNEPPGARMRVGLTALTMAEYFRDVNKQNVLLFIDNIFRFVQAGSEVSALLGRMPSAVGYQPTLSTEMGSLQERITSTKKGSITSIQAVYVPADDLTDPAPATTFAHLDATTVLSRGLAAKGIYPAVDPLDSTSTMLQPRIVGTEHYETAQRVKETLQRYKELQDIIAILGLDELSEEDRLTVARARKIERFLSQPFFVAEVFTGSPGKYVGLAETIRGFQLILSGELDGLPEQAFYLVGNIDEATAKAINLXIEXWRVIS

SEQ ID NO: 2274 - protein, 495 aa, SYNECHOCOCCUS SP. WH 8102
MVVSARILSLGMGQFDQNRRTKIVATIGPATESSERIKELVQAGATTFRLNFSHGDHSEHAARISTIRQVSEELGINIGILQDLQGPKIRLGRFAEGPITLANGDSFSLTSRPVSCNQSIATVTYDKLADEVTAGSRILLDDGRVEMKVEQVDQAEQTLHCTVTVGGVLSNNKGVNFPDVQLSVRALTDKDKVDLEFGLSQGVDWVALSFVRNPSDMEEIRGLIREHGHETPVVAKIEKFEAIDQIDAILPLCDGVMVARGDLGVEMPAEEVPLLQKELIRKANSLGIPIITATQMLDSMASSPRPTRAEVSDVANAILDGTDAVMLSNETAVGDFPVEAVQTMATIACRIEKDYPQRSVDSHLASTVPNALSGAVSTIASQLNASAILPLTKSGATAKNVSKFRPASPILAITPDPTVACRLQLVWGVKPLVIPQHELTTHTFLAAMTQAKTMGLLKEGDLVVQTAGTHTGVSGSTDLVKVGIVSSEEAPVNMI

SEQ ID NO: 2275 - protein, 426 aa, Xylella fastidiosa Temecula1
MSEDRQSRSGDGNKILYCSFCGKSQREVRKLIAGPSVFICDECVELCNDIIREELEEKSQSARSSLPKPKEILEVLDQYVIGQQRAKRTLAVAVYNHYKRIESRHKNDDIELAKSNILLVGPTGSGKTLLAETLARLLNVPFTIADATTLTEAGYVGEDVENIIQKLLHKCDYDVEKAQHGIVYIDEIDKISRKSENPSITRDVSGEGVQQALLKLIEGTVASVPPQGGRKHPQQEFLQVDTKNILFICGGAFAGLDKVIQQRCNEVGGIGFGVKVKSSESKRDVGKVLAGVEPEDLIKFGLIPEFVGRLPVVATLDELDESALVKILTEPKNAITKQFKKLFEMENVELEFRQDALSAVARKALKRKTGARGLRTIVELVLLDTMYELPSQEGISKVVVDESVIENKSEPYLIYQTMPAKVASGE

SEQ ID NO: 2276 - protein, 484 aa, Rheum pinchonii
  unsure (1)..(484): unsure at all Xaa locations
PGVSXLEKINLGRVAQIIGPVLDVAFPPGKMPNIYNALVVKGRDTSGHPINVTCEVQQLLGNNRVRTVAMSATDGLTRGMEVIDTGAPLSVPVGGATLGRIFNVLGEPVDNLGPVDTRTTSPIHRSAPAFIQLDTKLSIFETGIKVVDLLAPYRRGGKIGLFGGAGVGKTVLIMELINNIAKAHGGVSVFGGVGERTREGNDLYMEMKESGVINEENIPESKVALVYGQMNEPPGARMRVGLTALTMAEYFRDVNKQDVLLFIDNIFRFVQAGSEVSALLGRMPSAVGYQPTLSTEMGSLQERITSTKQGSITSIQAVYVPADDLTDPAPATTFAHLDATTVLSRALAAKGIYPAVDPLDSTSTMLQPRIVGEAHYKIAQRVKQTLQRYKELQDIIAILGLDELSEEDRLTVARARKIERFLSQPFFVAEVFTGSPGKYVGLAETIRGFQLILSGELDGLPEQAFYLVGNIDEATAKAMNFEME

SEQ ID NO: 2277 - protein, 495 aa, Ornithogalum caudatum
MRINPTTSGSAVSALEEKNLGRIAQIIGPVLDVVFPPGKMPNIYNALVVKGRDTVGQQINVTCEVQQLLGNNRVRAVAMSATDGLTRGMEVIDTGAPLSVPVGGATLGRIFNVLGEPVDNLGPVDTRTTSPIHRSAPAFIQLDTKLSIFETGIKVVDLLAPYRRGGKIGLFGGAGVGKTVLIMELINNIAKAHGGVSVFGGVGERTREGNDLYMEMKESGVINEKNIAESKVALVYGQMNEPPGARMRVGLTALTMAEYFRDVNEQDVLLFIDNIFRFVQAGSEVSALLGRMPSAVGYQPTLSTEMGSLQERITSTKEGSITSIQAVYVPADDLTDPAPATTFAHLDATTVLSRGLAAKGIYPAVDPLGSTSTMLQPRIVGEEHYEIAQRVKQTLQRYKELQDIIAILGLDELSEEDRLTVARARKIERFLSQPFFVAEVFTGSPGKYVGLAETIRGFQLILSGELDGLPEQAFYLVGNIDEATAKAMNLEGEKK

SEQ ID NO: 2278 - protein, 525 aa, Triticum aestivum
MEASVQQGNYVQVYVMLPLDVVSVNNRFEKGDELRGQLKRLVEAGVDGVMVDVWWGLVEGKGPRAYDWSAYKQLFKLVHEAGLKLQAIMSFHQCGGNVGDVVNIPIPQWVRNVGASDPDIFYTDQHGTRNIEYLTLGVDDQPLFHGRSAVQMYADYMASFRDNMKEFLDAGVIVDIEVGLGPAGELRYPSYPQSHGWSFPGIGEFICYDKYLQADFKAAAAMVGHPEWEFPHDSGTYNDTPQRTRFFVDNGTYLTEQGRFFLAWYSNNLIKHGDKILDEANKVFLGHRVQLAIKISGIHWWYKAPSHAAELTAGYYNLHDRDGYRPIARMLKRHHASLNFTCAEMRDSEQSSQARSAPEELVQQVLSAGWREGLNVACENALPRYDPTAYNTILRNARPHGINKSGPPEHKLFGFTYLRLSNQLVEGQNYVNFKTFVDRMHANLPHDPCVDPVAPLQRSGPELTIEMILQAAQPKLEPFPFEEHTDLPVQGLGGIGGDVEGPTGGMGGEVQDPTGSMGGELPATV

SEQ ID NO: 2279 - protein, 268 aa, Vibrio metschnikovii
MDRYQHLFQRLAAHNQGAFVPFVTIGDPNPQQSLRIMQTLVEAGADALELGIPFSDPLADGPTIQGAISALDSGTKPIRCFEADQAPIRAQDIPIYLLMYANLVYARGIDNFYQRCQQAGVDSVLIADVPTNESAEFGPAAKKYAIHPIFIAPPTASDETLQSVAELGSGYTYLLSRSGVTGAETKANMPVHALLERLNQFSAPPRRLGFGISEPEQVKQAIESGAAGAISGSAVVKIIEHHLAKPEAMLAELKTFVSAMKSATKHDK

SEQ ID NO: 2280 - protein, 425 aa, Rickettsia sibirica
MVVEADKKALICSFCSKKQHEVKKLIAGPAVFICDECIDLCTDIMKEENKVALKQITSSIPTPQKICGILNDYVVGQDQAKKILAVAVYNHYKRLEYLQSGNNDVELNKSNILLIGPTGSGKTLLAQTLAKILDVPFTMADATSLTEAGYVGEDVENILLRLLIASEFNIAKAQKGIIYIDEVDKIARKSENPSITRDVSGEGVQQALLKIMEGTVASVPPQGGRKHPQQDFVQLDTSNILFICGGAFMGIDSIITSRTNHSSIGFTANVNIDKEKNNSEILKSLEIEDLTKFGLIPEFIGRLPIVTTLDELDKEALITILTKPKNAIVKQYQKQFELDDAELVIDYSALETIAEKALAKKTGARGLRSILEHLLLDSMYKVAELKKQRVTITKEVVNGLVKPIMTSLISTKSNKKQPIIADIPA

SEQ ID NO: 2281 - protein, 219 aa, Rhodopseudomonas palustris
MTPELVIFDCDGVLVDSELISCRVHAETLTRYGYPITPDQVAARFLGRSGREARREIEAEIGRRFADDIEANLLDALLRAFAETLQPIPFVTDALDTLGRPFCVASSGTLDRIGVALTHAGLHARFAPHLFSAQQVAHGKPAPDLFLFAAAQMGAAPECCVVIEDSVPGVLGAKAAGMTVLGFHGGSHCTDATAAALAAAGAGRCFDDMRQLSGIIEEI

SEQ ID NO: 2282 - protein, 959 aa, Arabidopsis thaliana
MCEPDDNSARNGVTTQPSRSRELLMDVDDLDLDGSWPLDQIPYLSSSNRMISPIFVSSSSEQPCSPLWAFSDGGGNGFHHATSGGDDEKISSVSGVPSFRLAEYPLFLPYSSPSAAENTTEKHNSFQFPSPLMSLVPPENTDNYCVIKERMTQALRYFKESTEQHVLAQVWAPVRKNGRDLLTTLGQPFVLNPNGNGLNQYRMISLTYMFSVDSESDVELGLPGRVFRQKLPEWTPNVQYYSSKEFSRLDHALHYNVRGTLALPVFNPSGQSCIGVVELIMTSEKIHYAPEVDKVCKALEAVNLKSSEILDHQTTQICNESRQNALAEILEVLTVVCETHNLPLAQTWVPCQHGSVLANGGGLKKNCTSFDGSCMGQICMSTTDMACYVVDAHVWGFRDACLEHHLQKGQGVAGRAFLNGGSCFCRDITKFCKTQYPLVHYALMFKLTTCFAISLQSSYTGDDSYILEFFLPSSITDDQEQDLLLGSILVTMKEHFQSLRVASGVDFGEDDDKLSFEIIQALPDKKVHSKIESIRVPFSGFKSNATETMLIPQPVVQSSDPVNEKINVATVNGVVKEKKKTEKKRGKTEKTISLDVLQQYFTGSLKDAAKSLGVCPTTMKRICRQHGISRWPSRKIKKVNRSITKLKRVIESVQGTDGGLDLTSMAVSSIPWTHGQTSAQPLNSPNGSKPPELPNTNNSPNHWSSDHSPNEPNGSPELPPSNGHKRSRTVDESAGTPTSHGSCDGNQLDEPKVPNQDPLFTVGGSPGLLFPPYSRDHDVSAASFAMPNRLLGSIDHFRGMLIEDAGSSKDLRNLCPTAAFDDKFQDTNWMNNDNNSNNNLYAPPKEEAIANVACEPSGSEMRTVTIKASYKDDIIRFRISSGSGIMELKDEVAKRLKVDAGTFDIKYLDDDNEWVLIACDADLQECLEIPRSSRTKIVRLLVHDVTTNLGSSCESTGEL

SEQ ID NO: 2283 - protein, 456 aa, POLYXENA ENSIFOLIA
MPNIYNALVVKGRDTVGQQINVTCEVQQLLGNNRVRAVAMSATDGLTRGMEVIDTGAALSVPVGGATLGRIFNVLGEPVDNLGPVDTRTTSPIHRSAPAFIQLDTKLSIFETGIKVVDLLAPYRRGGKIGLFGGAGVGKTVLIMELINNIAKAHGGVSVFGGVGERTREGNDLYMEMKESGVINEKNIAESKVALVYGQMNEPPGARMRVGLTALTMAEYFRDVNEQDVLLFIDNIFRFVQAGSEVSALLGRMPSAVGYQPTLSTEMGSLQERITSTKEGSITSIQAVYVPADDLTDPAPATTFAHLDATTVLSRGLAAKGIYPAVDPLDSTSTMLQPRIVGEEHYEIAQRVKQTLQRYKELQDIIAILGLDELSEEDRLTVARARKIERFLSQPFFVAEVFTGSPGKYVGLTETIRGFQLILSGELDSLPEQAFYLVGNIDEATAKAMNLEGEKK

SEQ ID NO: 2284 - protein, 321 aa, Desulfitobacterium hafniense
MRRTKIVCTIGPSSESNEKIRQLLKAGMNVARLNFSHGTHGEHGKRIRTLREEAQKLGVHLGVLLDTKGPEIRTGTVPEEGVQLNSGDTFILDTDLSTLGSAERVGITYLQLWQEVHQGTHILLDDGLIDLEVIASEEGKIITKIQNGGVLKSKKGVNVPGVPIQLPAITEKDRDDIIFGLREGIDFIAASFARKAADILAVRRLVEEEGANVKIIAKIENREGIEHLDEILEVADGLMVARGDLGVEVPVEEVPIHQKDMIEKCHHLGKTVIAATQMLDTMIRKPRTTRAAASDVAHAIQTDRCTCFRETCRRTGEREYE

SEQ ID NO: 2285 - protein, 344 aa, Oryza sativa
  unsure (1)..(344): unsure at all Xaa locations
MADHAAAEAAPQSSQEEEEDWKEAEGGDGDVEVADRGGGGGAANGGIPEGRPIRVYADGIYDLFHFGHAKSLEQAKRLFPNTYLLVGCCNDELTHKYKGRTVMTEDERYESLRHCKWVDEVIPDAPWVVTEEFLNKHNIDFVAHDSLPYADASGAGNDVYEFVKKLGKFKETQRTDGISTSDIIMRIVKDYNEYVMRNLARGYTRKDLGVSYVKEKRLRVNMGLKNLRDKVKQHQEKVGEKWNTVAKLQEEWVENADRWVAGFLEKFEEGCHSMGTAIKERIQERLKAQSRDFSLLQYDGEDVDEDEDDDEYVREXCHHCEYTSRYFNXLSKIRAEKKKKKKKK

SEQ ID NO: 2286 - protein, 485 aa, Kedrostis nana
  unsure (1)..(485): unsure at all Xaa locations
XGESXLEKNNLGRIAQIIGPVLDVAFPPGKMPNIYNALIVKGQDTAGQEINVTCEVQQLLGNNRVRAVAMSATDGLMRGMEVVDTRAPLSVPVGGTTLGRIFNVLGEPIDNLGPVDTRTTSPIHRSAPSFIQLDTKLSIFETGIKVVDLLAPYRRGGKIGLFGGAGVGKTVLIMELINNIAKAHGGVSVFGGVGERTREGNDLYMEMKESGVINEENIAESKVALVYGQMNEPPGARMRVGLTALTMAEYFRDVNEQDVLLFIDNIFRFVQAGSEVSALLGRMPSAVGYQPTLSTEMGSLQERITSTKEGSITSIQAVYVPADDLTDPAPATTFAHLDATTVLSRGLAAKGIYPAVDPLDSTSTMLQPRIVGEEHYETAQRVKQTLQRYKELQDIIAILGLDELSEEDRLTVARARKIERFLSQPFFVAEVFTGSPGKYVGLAETIRGFKLILSGELDGLPEQAFYLVGNIDEATAKATNLEMES

SEQ ID NO: 2287 - protein, 411 aa, Lactococcus lactis subsp. lactis
MSNTQNPNIHCSFCGKSQDDVKKLIAGSDVYICNECIELSTRILEEELREEQDSEMLEVKTPKEMFDHLNEYVIGQEKAKRALAVAVYNHYKRINFAASKIAEDIELQKSNILLIGPTGSGKTFLAQTLAKSLNVPFAIADATSLTEAGYVGEDVENILLKLLQASDFNIERAERGIIYIDEIDKIAKKSENVSITRDVSGEGVQQALLKIIEGTVASVPPQGGRKHPNQEMIQIDTKNILFIVGGAFDGIEEIVKQRLGEKIIGFGANNKKLNDDDSYMQEIIAEDIQKFGLIPEFIGRLPIVAALERLTEEDLIQILTEPKNALIKQYKQLLLFDNVELEFEDEALMAIARKAIERKTGARGLRSIIEEVMMDIMFEVPSHEEITKVIINEAVVDGKAEPQMIREAKKK

SEQ ID NO: 2288 - protein, 329 aa, Brassica napus
MSNVTADPTTDGPSTAVAVSGSAAIQASPPTDRPVRVYADGIYDLFHFGHARSLEQAKKSFPNTYLLVGCCNDETTHKYKGRTVMTAEERYESLRHCKWVDEVIPDAPWVINQEFLDNHRIDYVAHDSLPYADTSGAGKDVYEFVKKVGRFKETMRTEGISTSDIIMRIVKDYNQYVMRNLDRGYSREDLGVSFVKEKRLRVNMRLKKLQERVKEQQEKVGEKIQTVKMLRNEWVENADRWVAGFLEIFEEGCHKMGTAIRDSIQERLIRQIPRKKLENGEDDDTDDQFYEEYFDHDMGSDEDEDERYYDEEEDVEEEKSVKKDAQDNK

SEQ ID NO: 2289 - protein, 484 aa, Grewia occidentalis
DSTLEKENLGRISQIIGPVLDVAFPPGKMPNIYNALVVKGRDTAGQQINVTCEVQQLLGNNRVRAVAMSATDGLTRGMEVIDTGAPLSVPVGGATLGRIFNVLGEPVDNLGPVDTRTTSPIHKPAPAFIQLDTKLSIFETGIKVVDLLAPYRRGGKIGLFGGAGVGKTVLIMELINNIAKAHGGVSVFGGVGERTREGNDLYMEMKESGVINEQNLAESKVALVYGQMNEPPGARMRVGLTALTMAEYFRDVNEQDVLLFIDNIFRFVQAGSEVSALLGRMPSAVGYQPTLSTEMGTLQERITSTKEGSITSIQAVYVPADDLTDPAPATTFAHLDATTVLSRGLAAKGIYPAVDPLDSTSTMLQPRIVGEEHYETAQRVKQTLQRYKELQDIIAILGLDELSEEDRLTVARARKIERFLSQPFFVAEVFTGSPGKYVGLAETIRGFKLILSGELDGLPEQAFYLVGNIDEATAKATNLEMESK

SEQ ID NO: 2290 - protein, 480 aa, Capsicum annuum [sequence omitted]

SEQ ID NO: 2291 - protein, 1088 aa, Arabidopsis thaliana
MAHSVCFDPAVTANLSLSAFHATVRFSEISVIPLNLSNFLEEALEVGLLKNQIFCSGFNRRRLVLGSVTQKAALETMEEVQPPVTPPIEPNGKRSEASLLDICEKVLSLDGSTCDEALKLFTETKRILSASMSNIGSGTREEVERFWFAFILYSVKRLSVRKEADGLSVSGDNEFNLCQILRALKLNIVDFFKELPQFVVKAGSVLGELYGADWENRLQAKEVQANFVHLSLLSKYYKRGFREFFLTYDANAEKNSANSSTYLLDSYRFGWLLFLALRNHAFSRFKDLVTCSNGVVSILAILIIHVPCRFRNFSIQDSSRFVKKGDKGVDLVASLCKIYDASEDELRIVIDKANNLVETILKKKPSPASECQTDKLDNIDPDGLTYFEDLLEETSISTSLITLEKDYYDGKGELDERVFINEEDSLLGSGSLSAGAVNITGVKRKIDALSSPARTFISPLSPHKSPAAKTNGISGATKLAATPVSTAMTTAKWLRTVISPLLPKPSPGLEHFLKSCDRDITNDVTRRAHIILEAIFPNSSLGAQCGGGSLQAVDLMDDIWAEQRRLEACKLYYRVLEAMCKAEAQILHANNLNSLLTNERFHRCMLACSAELVLATHKTITMLFPAVLERTGITAFDLSKVIESFIRHEDSLPRELRRHLNSLEERLLESMVWEKGSSMYNSLIVARPSLALEINQLGLLAEPMPSLDAIAALINFSDGANHASSVQKHETCPGQNGGIRSPKRLCTDYRSILVERNSFTSPVKDRLLALGNVKSKMLPPPLQSAFASPTRPNPGGGGETCAETGINIFFTKINKLAAVRINGMVERLQLSQQIRESVYCFFQHVLAQRTSLLFSRHIDQIILCCFYGVAKISQMSLTFREIIYNYRKQPQCKPLVFRSVYVDALQCRRQGRIGPDHVDIITFYNEIFIPAVKPLLVELGPVRNDRAVEANNKPEGQCPGSPKVSVFPSVPDMSPKKVSAVHNVYVSPLRGSKMDALISHSTKSYYACVGESTHAYQSPSKDLSAINNRLNNSSNRKRTLNFDAEAGMVSDSMVANSLNLQNQNQNQNGSDASSSGGAAPLKTEPTDS

SEQ ID NO: 2292 - protein, 91 aa, Saccharomyces bayanus
  unsure (1)..(91): unsure at all Xaa locations
ISQSLSKYSNSXAIIYVGCGERGNEMAEVLMEFPELYTEMSGTKEPIMKRTTLVANTSNMPVAAREASIYTGITLAEYFRDQGKNVSMIAD

SEQ ID NO: 2293 - protein, 106 aa, Vibrio parahaemolyticus
EEALIQILCEPKNALTKQYAALFELENAELEFREDALRAIAKKAMERKTGARGLRSILESVLLETMYELPSATDVSKVVIDESVINGESEPLLIYSNADNQAAGAE

SEQ ID NO: 2294 - protein, 472 aa, Ralstonia solanacearum
MQRSSHAKIVATLGPASDDHATIEALARAGADVFRLNFSHGAHADHQRRLERIRAVEAALGRPLGVLLDLQGPKLRVGTFAEGRVRLDDGAPFRLDLETGRPGDATRVALPHPEIFAAIRPGVALLLDDGKLRLEVVACGPDHAETRVVNGGMLSDRKGVNVPGVVLPLSALTEKDRADLAFGLALGVDWIALSFVQRAADIAEIRQLVHGRAGIVAKLEKPAAIDSLDAILAETDAVMVARGDLGVELPAEQVPAIQKRIVRACRRLGKPVIVATQMLESMIGAPVPTRAEASDVATAVYDGADAVMLSAETASGQFPVEAVAMMRRIIAQTEADPHYRAAIDASHTPPGANTPDAIGCAAHSVAGLLDVAAMVAYTSSGASALRMARERPRAAILGMTPRPETARRLALVWGVHPVICDGVLDVEAMTDVARQTAVQRRFAQAGQTLVIAAGLPFGTPGSTNLLRIAQVE

SEQ ID NO: 2295 - protein, 1248 aa, Arabidopsis thaliana
MHARQRNVGNGYRSGSIGMGMSGSRISPERPMRGHGFYGSEHQHRGFNRGYGRGRGRSKSYHNQLPPPLPPPPVQRRSSGGDVFMEAGRLATEYLVSQGVLPQTVLSSKWQNGNFRKQAGEFQSSRSQEEARMDVSAPAAEKRRYIDGYSSAGSRNSLKGRRSHRYDSDFGRSGSWSERSKAFETETGDDSVSGHQEEQPLAEDIASSVQRSASGEFMRKCEGAGDSESVLDKYNLQDEAQSKTGSSSAGKDIVQDCEISKVSEGSSSLSAGSGEMKGRSGGNGGEDENQTAIEDGSIHQRCEDASIDQQCGADESFTKSGIDLATLCKFEKVPTRTRSSLTAKGPKLYLSHNIKDTSHNSGLEEEDQTENRCETRGQSSGKADSTGDENDQVEDFALVQYIENSKCHRSNSFPSSILRDNSEKESGLELPNLHRSHSVGKVGEKRPGEGSDLEEGSKRQRDWVAVSEANERFNMFKTSGNQCDPEEEGKTSSFNKRLIDGAAGKRVSHESLVNNSTYNRTHTGRTGPGYAEEHQLFPASFKMCDLNLGGASDVNDGIKESRQAVDFDLSISSSSKSLEFGTSTRMSNGKEIEVINLDDDQEVVKSSNDPGRKQEAAPYMGIDDVPDYNERLMMVEYLDSFTPINQGTSSVPQNNNTVSLQDREILKTSQGAIGNDQVPNNTDDDSIFMSLGEIPLNFFVESMDLESESSALESVDDNVLIQQSASNVCDDGRSLDNGSCSDESVKLLSTSNSVELGKPMSFDSPGDGGGAYSPVLKGQGLRKWRRIRRDLVKDTSANMENSKALKRGLSGVAHSHGKQMQFQSPEVEQESQGSVGSVNMLKSSGDGFDILGSSGYDSRFVAGVGFSAGMDLEIDDDRSSKSSTVARAPKVIRYEKPMISSGQGGNIRVENSKKHRGESVDFEKENSYSSLESDSRKQSGRMMDYNGENGETSMRKDDAGGEGGESINTDNRYSDEMDPLTEAINGFLALQDALEKEVQQFQEIGNEPMPQHHEQVSEANSPHPEIVTLVNNVEQLENMLEETRSMLEVKESHIRDLESTTNQSKHSWGGTEIVVEDIFRQKIEAEIEYLIYSRSIDNLNSQMKLIDEQESLAEEQTHETLNKLGRVQTKAANFTNRAQDLQNDCIEITGTIKKRAFNTNKAKTAVAAEINSEIKRGVESAVEAFRKRRPIRNKLKMEGGEGRQQKDIPDMELEEERDTNSAIRKKNNNISSMKLLLKKLVTFSKKNT

SEQ ID NO: 2296 - protein, 242 aa, Escherichia fergusonii
LKKRKEGAFVPFVTLGDPGIEQSLKIIDTLIEAGADALKLGIPFSDPLADGPTIQNATLRAFAAGVTPAQCFEMLALIRQKHPNIPIGLLMYANLVFNKGIDEFYAQCEKVGVHSVLVADVPVEESAPFRQAALRHNVAPIFICPPNADEDLLRQIASYGRGYTYLLSRAGVTGAENRAALPLNHLVAKLKEYNAAPPLQGFGISAPDQVKAAIDAGAAGAISGSAIVKIIEQHINEPEKML

SEQ ID NO: 2297 - protein, 496 aa, Humulus lupulus
INPTTSSPGVPALEKKNLGRIAQIIGPVLDVAFPPGKMPNIYNALVVKGRDTVGQQINVTCEVQQLLGNNRVRAVAMSATDGLMRGMDVIDTGAPLSVPVGGATLGRIFNVLGEPVDNLGPVDTRTTSPIHRSAPAFIQLDTKLSIFETGIKVVDLLAPYRRGGKIGLFGGAGVGKTVLIMELINNIAKAHGGVSVFGGVGERTREGNDLYMEMKESGVINEQNIAESKVALVYGQMNEPPGARMRVGLTALTMAEYFRDVNEQDVLLFIDNIFRFVQAGSEVSALLGRMPSAVGYQPTLSTEMGSLQERITSTKEGSITSIQAVYVPADDLTDPAPATTFAHLDATTVLSRGLAAKGIYPAVDPLDSTSTMLQPRIVGEEHYETAQRVKETLQRYKELQDIIAILGLDELSEDDRLTVARARKIERFLSQPFFVAEVFTGSPGKYVGLAETIKGFKLILSGELDGLPEQAFYLVGNIDEATAKATNLEMENKLKK

SEQ ID NO: 2298 - protein, 246 aa, Gerbera hybrid cv. 'Terra Regina'
MSFPNDSGEMSPQRKLGRGKIEIKRIENTTNRQVTFCKRRNGLLKKAYELSVLCDAEVALIVFSSRGRLYEYANNSVKGTIDRYKKACLDPPSSGSVAEANAQFYQQEAAKLRQQIANLQNQNRQFYRNIMGESLGNMPAKDLKNLESKLEKGIGKIRSKKNEILFAEIEYMQKRENELHNSNQFLRSKIAENERAQQHMSLMPGSSDYELVAPHQPFDGRNYLQVNDLQPNNNYSCQDQTPLQLV

SEQ ID NO: 2299 - protein, 475 aa, Strychnos nux-vomica
  unsure (1)..(475): unsure at all Xaa locations
XXXSGVSTLEKKNPGRIVQXIGPVLDAAFGPAKMPNIXNALVVQGRDTVGQPINVXCEVQQLLGNNRVRAVAMSATDGLMRGMEVIDTGAPLSVPVGGATLGRIFNVLGEPIDNLGPVDTRTTSPIHRSAPAFIQLDTKLSIFETGIKVVDLLAPYRRGGKIGLFGGAGVGKTVLIMELINNIAKAHGGVSVFGGVGERTREGNDLYMEMKESGVINEENIAESKVALVYGQMNEPPGARMRVGLTALTMAEYFRDVNEQDVLLFIDNIFRFVQAGSEVSALLGRMPSAVGYQPTLSTEMGSLQERITSTKEGSITSIQAVYVPADDLTDPAPATTFAHLDATTVLSRGLAAKGIYPAVDPLDSTSTMLQPRIVGEEHYETAQRVKQTLQRYKELQDIIAILGLDELSEEDRLTVARARKIERFLSQPFFVAEVFTGSPGKYVGLAETIRGFQLILSGELDGLPEQAFYLVGNID

SEQ ID NO: 2300 - protein, 280 aa, Corynebacterium efficiens YS-314
MSRYTDMFTRLDEAGEGAFVPFIMLNDPSPEDSFQIISTAIEAGADALELGVPFSDPVADGPTVAESHLRALDGGSTVDSCLALIARVREAYPEIPIGMLIYGNVPFTRGLDKFYREFAEAGADSILLPDVPVREGAPFIQAAEGAGIDPIFIAPAQASETTLEGVSAASKGYIYAISRDGVTGTERESSTTGLTDVVDNIKRFGGAPILLGFGISSPKHVADAIAAGAAGAITGSAITKIIASHCEGEHPNPSTITDPEGLRKELTEFISAMKAATKKQ

SEQ ID NO: 2301 - protein, 81 aa, Brassica rapa
  unsure (1)..(81): unsure at all Xaa locations
PKELRNLEGRLDRSINRIRSKKNELLFAEIDYMQKREVDLHSENQRLRAKIAENERXNPSMNLMPGGYEQTMQPPQTQSQP

SEQ ID NO: 2302 - protein, 286 aa, Cyanidium caldarium
MKVNLQTEFKQTQIQQVLDDLDRELIGLQAVKTRIREIAALLLVDRLRQKLGLSSSNPGLHMSFTGSPGTGKTTVATKMADILYRLGYIKKGHLITVTRDDLVGQYIGHTAPKTKQVLKNAMGGVLFIDEAYYLYRPDNERDYGAEAIEILLQVMENQRDDLVIIFAGYKEKMDRFYASNPGLSSRVANHVNFPDYTPEELLMIGKIMLQEQQYQFTPEAEEVFLQYIQRRMQQPHFANARSVRNALDRARLRQANRIFATPGQNLTKYDLVTIQAEDILKCRLFQ

SEQ ID NO: 2303 - protein, 498 aa, Rogiera suffrutescens
  unsure (1)..(498): unsure at all Xaa locations
XXXXXXXXXSGVSTLEKKNLGRIVQIIGPVLDVAFPPGKMPNIYNALVVKGRDTLGQPINVTCEVQQLLGNNRVRAVAMSATDGLMRGMEVIDTGAPLSVPVGGATLGRIFNVLGEPVDNLGPVDTRTTSPIHRSAPAFIQLDTKLSIFETGIKVVDLLAPYRRGGKIGLFGGAGVGKTVLIMELINNIAKAHGGVSVFGGVGERTREGNDLYMEMKESGVINEENIAESKVALVYGQMNEPPGARMRVGLTALTMAEYFRDVNEQDVLLFIDNIFRFVQAGSEVSALLGRMPSAVGYQPTLSTEMGSLQERITSTKEGSITSIQAVYVPADDLTDPAPATTFAHLDATTVLSRGLAAKGIYPAVDPLDSTSTMLQPRIVGEEHYETAQRVKQTLQRYKELQDIIAILGLDELSEEDRLTVARARKMERFLSQPFFVAEVFTGSPGKYVGLAETIRGFQLILSGELDSLPEQAFYLVGNIDEATAKAMNLEMENNLKK

SEQ ID NO: 2304 - protein, 490 aa, Lomatia myricoides
GLGVSALEEKNLGRIAQIIGPVLDIAFPPGKMPNIYNALVVKGRDTVGQQINVTCEVQQLLGNNRVRAVAMSATDGLTRGMEVIDTGAPLSVPVGGATLGRIFNVLGEPVDNLGPVDTRTTSPIHRSAPAFIQLDTKLSIFETGIKVVDLLAPYRRGGKIGLFGGAGVGKTVLIMELINNIAKAHGGVSVFGGVGERTREGNDLYMEMKESGVINEQNIAESKVALVYGQMNEPPGARMRVGLTALTMAEYFRDVNEQDVLLFIDNIFRFVQAGSEVSALLGRMPSAVGYQPTLSTEMGSLQERITSTKEGSITSIQAVYVPADDLTDPAPATTFAHLDATTVLSRGLAAKGIYPAVDPLDSTSTMLQPRIVGEEHYETAQRVKQTLQRYKELQDIIAILGLDELSEEDRLTVARARKIERFLSQPFFVAEVFTGSPGKYVGLAETIRGFQLILSGELDGLPEQAFYLVGNIDEATAKAMNLEVESNLKK

SEQ ID NO: 2305 - protein, 279 aa, Magnetococcus sp. MC-1
MEDLHSGASRHLRSGTGRAVMSRKSALEGHIKDKLQQQDILLMSHIVLGYPSLQANREVIRAMVAGGVDLMELQIPFSEPIADGPTIARANQAALDGGFKVREGLAFIREVVAAFNIPFLIMTYTNILMAYGVERFIDEVADIGVKGLIIPDLPLEQAQAAIEQCRAKGMDWIGLMTPTSVDERLGKIGAAADGFVYCVARRGVTGSKTSFDEHVGAFMHRCRQATPVPLAVGFGVRSAEDVDYLKGKAEIAVVGSAALDLFDQAGAAALEPFFRGLRG

SEQ ID NO: 2306 - protein, 428 aa, Xanthomonas campestris pv. campestris str. ATCC 33913
MSEDRQGRSGDSNKILYCSFCGKSQHEVRKLIAGPSVFICDECVELCNDIIREELEEKAQSARSSLPKPREILEVLDQYVIGQLRAKRTLAVAVYNHYKRIESRSKNDEVELAKSNILLVGPTGSGKTLLAETLARLLNVPFTIADATTLTEAGYVGEDVENIIQKLLQKCDYDVEKAQQGIVYIDEIDKISRKSENPSITRDVSGEGVQQALLKLIEGTVASVPPQGGRKHPQQEFLQVDTKNILFICGGAFAGLDKVIQARSNDAGGIGFGAKVKSSERKQEVGKILAEVEPEDLIKFGLIPEFVGRLPVVATLEELDEPALIKILTEPKNAITKQFKKLFEMESVELEFRPDALSAIAKKALKRKTGARGLRTIVESVLLDTMYELPSQENVSKVVVDESVIEHKSEPYLIYQAQPAPAKAASGD

SEQ ID NO: 2307 - protein, 217 aa, Clostridium perfringens str. 13
MLSNIKGVIFDLDGTLVDSMGVWAKIDSDYLTDLGLEVPKNLKEEITHLGFKEVAKYFKKRFNIASSEEEIMKTWHDMAYVEYKNNIKLKSGAREFLEQLKESNIKIGLATSNSYPLLEVCLKSNDIFHLFDSITITGEVPRGKDFPDVYLLAAERLGLEPKECAVFEDILPAVKGALSAGMKVFAVEEHTVSEEEKSQIKEIVHEYIDSFNDLLVN

SEQ ID NO: 2308 - protein, 474 aa, Ureaplasma urealyticum
MFSKTRIIATVGPATTKLFSNWLEFNDLNNINDAQQVCINIKDLILSGVNIFRMNLSHGDQKIHLFRTQLIKKIADELKIKVEILFDTKGPEIRVCEMSDNNFIIKNSEVIIHCKEKVLGSFNEFSVTDATGQYNMISDVKINHRILIDDGKLILIVKKIDFLKNIIYTTAKNSYSLKTNKRLNLPDANYSLPFLSKKDIDDINLAVKLKIPYLALSFISNIKQINEVKQLLKKSSFIPKLIAKIETQEAIDNLEEIIKNTDGIMVARGDLGLEVPFYKIPIYQNKIVELCHKYNKYCIIATQMLDSLERNIIPTRAEVTDVYYAVKQKVNATMLSGETAAGIDPINAVQVMKSIILETENNNIENEITFKKNELLIPKEVKLKILSFHKLKINKHKLLVVNLISKNSKHLVYDILKYDFNFNILFVIDKNQEHDLLLKNANFIISENKMLKQEELLKSFNIDFNNHEFLFISI

SEQ ID NO: 2309 - protein, 420 aa, Heliobacillus mobilis
MYKGFGDDKGQLKCSFCGKLQDQVKKLVAGPGVYICDECIELCNEIIEEELQDENTFDLGDVPKPKEIREILDQYVIGQDQAKKALSVAVYNHYKRINLGSKIDDIELQKSNIVMLGPTGSGKTLLAQTLARILNVPFAIADATSLTEAGYVGEDVENILLKLIQAADYDVEKAEKGIVYIDEIDKIARKSENPSITRDVSGEGVQQALLKILEGTVASVPPQGGRKHPHQEFIQLDTTNILFICGGAFDGIDKLIMNRVGKKAMGFNADIKGKQDKNIGEVLRDILPGDLLKFGLIPEFVGRLPVIVTLDALDEDALVRILTEPKNALIKQYQKFFELDQVNLEFQDEALRAIAHEAIKRNTGARGLRAIIEEVMLDVMFDIPSRNDVTKCMVTKEVILKQKEPVLVTADRKKKKEESA

SEQ ID NO: 2310 - protein, 475 aa, Humiria balsamifera
  unsure (1)..(475): unsure at all Xaa locations
KNXGRIAQIIGPVLDVAFPPGKMPNIYNALVVKGRDTVGQQINVTCEVQQLLGNNRVRAVAMSATDGLMRGMEVIDTGAPLNVPVGGATLGRIFNVLGEPVDDLGPVDARTTSPIHRSAPAFIQLDTKLSIFETGIKVVDLLAPYRRGGKIGLFGGAGVGKTVLIMELINNIAKAHGGVSVFGGVGERTREGNDLYMEMKESGVINEENIAESKVALVYGQMNEPPGARMRVGLTALTMAEYFRDVNEQDVLLFIDNIFRFVQAGSEVSALLGRMPSAVGYQPTLSTEMGSLQERITSTKEGSITSIQAVYVPADDLTDPAPATTFAHLDATTVLSRGLAAKGIYPAVDPLDSTSTMLQPQIVGEEHYETAQRVKQTLQRYKELQDIIAILGLDELSEEDRLTVARARKIERFLSQPFFVAEVFTGSPGKYVGLAETIRGFKLILSGELDSLPEQAFYLVGNIDEATAKATNLEM

SEQ ID NO: 2311 - protein, 417 aa, Enterococcus faecalis V583
MYDNTDNNGTVRCSFCGKTQEEVKKIVAGPGVYICNECIDLCKEIIDEEFYDEAVRELTDVPKPQEILNVLNEYVIGQERAKRTLSVAVYNHYKRVNQSETAATQDDVELQKSNICLIGPTGSGKTFLAQTLAKTLNVPFAIADATSLTEAGYVGEDVENILLKLLQSADYNVERAEKGIIYIDEIDKIARKSENVSITRDVSGEGVQQALLKILEGTVASVPPQGGRKHPHQEFIQIDTTNVLFIVGGAFDGIETIVKNRLGEKTIGFGKTNSALNEEESIMQHIIPEDLLKFGLIPEFIGRLPVMAALDKLTNDDLVRILTEPKNALVKQYQKLLSLDDTKLEFEPEALKAIAAKAIERNTGARGLRSIIEEIMMDVMFDVPSDESIEKVIITKMAAEGTGKPTIIYNKKDKEAV

SEQ ID NO: 2312 - protein, 456 aa, Ailanthus altissima
  unsure (1)..(456): unsure at all Xaa locations
IGPVXXVAFPPGKMPNIXNALVVXGRDTSGQPINVXCGVQQLLGNXRVRAVAMSATVXLTRGMEVIDTGAPLSVPVGGATLGRIFNVLGEPVDNLGPVDTRATSPIHKPAPAFIQLDTKLAIFETGIKVVDLLAPYRRGGKIGLFGGAGVGKTVLIMELINNIAKAHGGVSVFGGVGERTREGNDLYMEMKESGVINEQNIAESKVALVYGQMNEPPGARMRVGLTALTMAEYFRDVNEQDVLLFIDNIFRFVQAGSEVSALLGRMPSAVGYQPTLSTEMGSLQERITSTKEGSITSIQAVYVPADDLTDPAPATTFAHLDATTVLSRGLAAKGIYPAVDPLDSTSTMLQPRIVGEEHYETAQRVKQTLQRYKELQDIIAILGLDELSEEDRLTVARARKIERFLSQPFFVAEVFTGSPGKYVGLAETIRGFKLILSGELDGLPEQAFYLVGNIDE

SEQ ID NO: 2313 - protein, 481 aa, Chlamydia muridarum
MIARTKIICTIGPATNTPEMLEKLLDAGMNVARLNFSHGTHESHGRTIAILKELREKRQVPLAIMLDTKGPEIRLGQVESPIKVKPGDRLTLTSKEILGSKEAGVTLYPSCVFPFVRERAPVLIDDGYIQAVVVNAQEHLIEIEFQNSGEIKSNKSLSIKDIDVALPFMTEKDITDLKFGVEQELDLIAASFVRCNEDIDSMRKVLENFGRPNMPIIAKIENHLGVQNFQEIAKASDGIMIARGDLGIELSIVEVPALQKFMARVSRETGRFCITATQMLESMIRNPLPTRAEVSDVANAIHDGTSAVMLSGETASGTYPIEAVKTMRSIIQETEKSFDYQAFFQLNDKNSALKVSPYLEAIGASGIQIAEKASAKAIIVYTQTGGSPMFLSKYRPYLPIIAVTPNRNVYYRLAVEWGVYPMLTSESNRTVWRHQACVYGVEKGILSNYDKILVFSRGAGMQDTNNLTLTTVNDVLSPSLE

SEQ ID NO: 2314 - protein, 458 aa, Streptomyces carzinostaticus subsp. neocarzinostaticus
MPSGTFKDQARAVGPAGSRLVTGILSRSGPFSRLGLPLLRGTLSTRDSDLTAAARDFGNRIHLRPVAVLHPADAEDVATIVRFGRENGFAVVPRGAACSVDGQAQTSDGIVVDLSSLSAVGEPAPSLVRVDGGARWRAVLEATLPCGRVPLVVPDHLGLSVGGTLSVGGIGGTSHRYGSVADNVLELEVVTASGDLLTCSPVRRPELFDAVRGSLGRYGIITGATLALTGARSSARTYRLVYHDCAAFLADQQRLVHERRFEHVEGHAHRSGTSGWLFVLEAMQSFDTPHEPDDTALLEGLTHHHVDTIETVSYRDFLGRVAPLEARQRALGSWQHHPHPRCNVLLPGLEAEALITRTLAGLTEEDIGPGGSVLLYPIPTARLAAPHVPKARDALTVVFGLQRTAPPDQPELLDRMVRDNLALRAAARKAGGADYAYAATHCEAPDAYESFGRTPQSR

SEQ ID NO: 2315 - protein, 484 aa, Cordisepalum phalanthopetalum
  unsure (1)..(484): unsure at all Xaa locations
TSGSGVSTVEKKNLGRIVQIIGPVLDVAFPPGKMPYIYNALVVQGRDNEQTKVTCEVQQLLGNNRVRAVAMSDTDGLMRGLEVIDTGAPISVPVGGSTLGRIFNVLGKPVDHLGPVDTNTTSPIHRSAPAXIQLDTKLSIFETGIKVXDLLAPYRRGGKIGLFGGAGVGKTVLIMELINNIAKAHGGVSVXGGVGERTREGNDLYMEMKESGVINEETIAESKVALVYGQMNEPPGARMRVGLTALTMAEYFRDVNEQDVLLFIDNIFRFVQAGSEVSALLGRMPSAVGYQPTLSTEMGSLQERITSTKEGSITSIQAVYVPADDLTDPAPATTFAHLDATTVLSRGLAAKGIYPAVDPLDSTSTMLQPRIVGEEHYEIAQRVKQTLQRYKELQDIIAILGLDELSEEDRLTVARARKIERFLSQPFFVAEVFTGSPGKYVGLAEAIRGFQLILSGELDGLPEQAFYLVGNIDEATAKAMNLKT

SEQ ID NO: 2316 - protein, 585 aa, Halobacterium salinarum
MSQAEAITDTGEIESVSGPVVTATGLDAQMNDVVYVGDEGLMGEVIEIEGDVTTIQVYEETSGIGPGQPVDNTGEPLTVDLGPGMLDSIYDGVQRPLDVLEDEMGAFLDRGVDAPGIDLDTDWEFEPTVEAGDEVAAGDVVGTVDETVSIEHKVLVPPRSDGGEVVAVESGTFTVDDTVVELDTGEEIQMHQEWPVRRQRPTVDKQTPTEPLVSGQRILDGLFPIAKGGTAAIPGPFGSGKTVTQQSLAKFADADIVVYIGCGERGNEMTEVIEDFPELPDPQTGNPLMARTTLIANTSNMPVAGRESCIYTGITIAEYYRDMGYDVALMADSTSRWAEAMREISSRLEEMPGEEGYPAYLAARLSEFYERAGYFENFNGTEGSISVIGAVSPPGGDFSEPVTQNTLRIVKTFWALDSDLAERRHFPAINWDESYSLYKDQLDPWFTDNVVDDWAEQRQSAVDILDEESELEEIVQLVGKDALPEDQQLTLEVARYIREAWLQQNALHDVDRYCPPEKTYAILSGIKTLHEESFEALDAGVPVEEITSIDAAPRLNRLGTTPDDEHEAEVAEIKQQITEQLRELY

SEQ ID NO: 2317 - protein, 607 aa, Neurospora crassa
MAPQQNGAEVDGIHTGKIYSVSGPVVVAEDMIGVAMYELVKVGHDQLVGEVIRINGDQATIQVYEETAGVMVGDPVLRTGKPLSVELGPGLLNNIYDGIQRPLEKIAEASNSIYIPRGIATPALDRKKKWEFTPTMKVGDHIAGGDVWGTVYENSFISVHKILLPPRARGTITRIAEKGEYTVEEKILEVEFDGKKTEYPMMQTWPVRVPRPAAEKHSANQPFLVGQRVLDALFPSVQGGTVAIPGAFGCGKTVISQSVSKFSNSDVIVYVGCGERGNEMAEVLKDFPELSIEVDGRKEPIMKRTTLIANTSNMPVAAREASIYTGITVAEYFRDQGMNVAMMADSSSRWAEALREISGRLGEMPADQGFPAYLGAKLASFYERAGKVQALGSPPREGSVSIVGAVSPPGGDFSDPVTSATLGIVQVFWGLDKKLAQRKHFPSINTSVSYSKYLTILDKWYEREYPDFPRLRDRIRQLLSDSEELDQVVQLVGKSALSDPDKITLDMATLIKEDFLQQNGYSDYDQFCPIWKTEWMMKLMMGFHDEAQKAIAQGQNWNKVREATQDLQAQLKSLKFEVPSEGQEKICKKYEAIQQQMLDKFASVIDE

SEQ ID NO: 2318 - protein, 483 aa, Tetracera asiatica
  unsure (1)..(483): unsure at all Xaa locations
INPTNSGPGFPHLKKKSXGRIAQIIGPSVDVXFPPGKMPNIYNALLVXGRDTAGQQINVTCEVQQLLGNNRVRAVAMSATDGLMRGMEVIDTEAPLSVPVGGATLGRIFNVLGEPIDNLGPVDTRTTSPIHRSAPAFXQLDTKLSIFDTGIKVVDLLAPYRRGGKIGLFGGAGVGKTVLIMELINNIAKAHGGVSVFGGVGERTREGNDLYMEMKESGVINEQNIAESKVALVYGQMNEPPGARMRVGLTALTMAEYFRDVNEQDVLLFIDNIFRFVQAGSEVSALLGRMPSAVGYQPTLSTEMGSLQERITSTKKGSITSIQAVYVPADDLTDPAPATTFAHLDATTVLSRGLAAKGIYPAVDPLDSTSTMLQPRIVGEEHYETAQRVKQTLQRYKELQDIIAILGLDELSEEDRLTVARARKIERFLSQPFFVAEVFTGSPGKYVGLAETIRGFQLILSGELDGLPEQAFYLVGNVXXATA

SEQ ID NO: 2319 - protein, 189 aa, Magnolia praecocissima
ELTVLCDAEVALIVFSSRGRLYEYSNNSIKATIERYKKACADSSNTTSITQANSQYYQQEASKLRQQIQILQNANRHLMGDALSSLTVKELKQLENRLERGITRIRSKKHELLFAEIEYMQKREVELQNDNLYLRAKIAENERAQQANVLPAPEFDTLPSFDSRNYFEANMLEAASHYSHQDQTALHLG

SEQ ID NO: 2320 - protein, 388 aa, COLEOCHAETE SP. 489A1
LLGDNKVRAVSMSATDGLMRGMDAIDTGAPLSVPVGEATLGRIFNVLGEPVDELGPVDTSKVSPIHRPAPAFTQLDTKLSIFETGIKVVDLLAPYRRGGKIGLFGGAGVGKTVLIMELINNIAKAHGGVSVFGGVGERTREGNDLYMEMKESKVINSDNLSESKVALVYGQMNEPPGARMRVGLTALTMAEYFRDVNKQDVLLFIDNIFRFVQAGSEVSALLGRMPSAVGYQPTLSTEMGTLQERITSTKEGSITSIQAVYVPADDLTDPAPATTFAHLDATTVLSRGLAAKGIYPAVDPLDSTSTMLQPWIVGEEHYEIAQGVKKTLQRYKELQDIIAILGLDELSEEDRLIVARARKIERFLSQPFFVAEVLTGSPGKYVSLVETI

SEQ ID NO: 2321 - protein, 215 aa, Bifidobacterium longum NCC2705
MTKAAIFDLDGTLLDSMGVWDQVDIDFLNKRGIEVPPDYMTKVSAMQFRQIAEYTIARFGLTDTPEELMQEWDDMASVAYSTTVEAKPGALDYLRDLKASGVKLGVATSLPPHLREPALRHVGMFELFNDIVSVDDANDVGKDQPDVYLLAAKRLGAAPVDCTVFEDLLVGMKSAKSVGMKVWAMHDDSSASDWPEICHLADGVLFDFHDAPRVL

SEQ ID NO: 2322 - protein, 349 aa, Lycopersicon esculentum
MGVQEKDPLLQLSLPPGFRFYPTDEELLVQYLCKKVAGHDFPLQIIGEIDLYKFDPWVLPSKATFGEKEWYFFSPRDRKYPNGSRPNRVAGSGYWKATGTDKVITSQGRKVGIKKALVFYVGKAPKGSKTNWIMHEYRLFESSRKNNGSSKLDEWVLCRIYKKNSSGPKPLMSGLHSSNEYSHGSSTSSSSQFDDMLESLPEMDDRFSNLPRLNSLKAEKFNLDRLDSANFDWAILAGLKPMPELGPANQAPGVQGQAQGHVNNHIHSDNNNMNFLNDVYAHPPNFRGNTKVESINLDEEVESGKRNQRIDQSSYFQQSLNGFSQAYTNNVDQFGIQCPNQTLNLGFKQ

SEQ ID NO: 2323 - protein, 239 aa, Phalaenopsis equestris
MDSSSMEPKEKMGRGKIEIKRIENTTNRQVTFCKRRNGLLKKAYELSVLCDAEVALIIFSTRGRLYEYANNSVKGTIERYKKASTDNSNTGSISEANSQYYQQEATKLRQQITNLQNSNRNLLGDALTTMSLRDLKQLETRLEKGINKIRAKKNELLHAEIDYMQKREMELQTDNMFLRNKISDNERAQQQHQHMSILPSTSTEYEVMPPFDSRSFLHVNLMDPNDRYSHQQQTALQLG

SEQ ID NO: 2324 - protein, 426 aa, Triticum aestivum
  unsure (1)..(426): unsure at all Xaa locations
MYVPQSSRGGGGSAGEQPRVYQVCRGSNEFLLQGRFIFGPDVRFFFLTIFLILAPVLVFCIFVSRHLINEVKYHWGILIFLXVVLVSSYAVWHIFIIGNSVXKIVPRNTHPPEPEXFDGNNDTGNGQTPQQLRLPRTKDVYVNGVVVKVKYCDTCMLYRPPRCSHCSICNNCVERFDHHCXPWDDQSIRLSTCRFFYIFVFSTTLLCLYVFGFCXVYIIKIRDAEGXRIWRAMLKTPASMXLIIYCLICVWFVGGLSVFHFYLMSTNQTTYENFRYRYDRRANPYNVGVVNNFLEIFCTAVPASKNNFRARVPVEQGLQQSRPPTRGFMSPNMGKPVGDLELGRKPVSWDEPRSGADIRDLEVGGMLDEKEGRITHASPDLSREALPVELMEGRGWYAFETIKLGSQKWDLRVDGQHRRADGRWRN

SEQ ID NO: 2325 - protein, 490 aa, Escallonia calcottiae
GSGVSTLEKKNSGRIAQIIGPVLDVAFPPGKMPNIYNALVVKGRDTGGQPINVTCEVQQLLGNNRVRAVAMSATDGLTRGMEVIDTGAPLSVPVGGATLGRIFNVLGEPVDNLGPVDTRTTSPIHRSAPAFIQLDTKLSIFETGIKVVDLLAPYRRGGKIGLFGGAGVGKTVLIMELINNIAKAHGGVSVFGGVGERTREGNDLYMEMKESGVINEQNIGESKVALVYGQMNEPPGARMRVGLTALTMAEYFRDVNEQDVLLFIDNIFRFVQAGSEVSALLGRMPSAVGYQPTLSTEMGSLQERITSTKEGSITSIQAVYVPADDLTDPAPATTFAHLDATTVLSRGLAAKGIYPAVDPLDSTSTMLQPRIVGEEHYEIAQRVKQTLQRYKELQDIIAILGLDELSEEDRLTVARARKIERFLSQPFFVAEVFTGSPGKYVGLAETIRGFQLILSGELDGLPEQAFYLVGNIDEATAKAMNLEMESNLKK

SEQ ID NO: 2326 - protein, 325 aa, Desulfitobacterium hafniense
MSHLMGIRITFPSEKNQAPIVQTPRTERNAAIVDSSSELSRGRKAAHHSSENGTMAEIIAELNALVGLSTVKRLIHEIQAYIEIQKRRTREKLVAEPLVLHMIFRGNPGTGKTTVARLIGRLFKEMEVLQKGHIIECERADLVGEYIGHTAQKTRDMVKKALGGILFIDEAYSLARGGEKDFGKEAIDALVKAMEDHKTDLILILAGYKHEMEWFLQTNPGLRSRFPIHIDFPDYSIEELLSIGDSMLKTRQYQFTAEARDVFRFMLQGVLNSHPYAGNARLVRNMVEKAIRKQAVRLYAKPTSSREELMGILPCDLNLDDDDLK

SEQ ID NO: 2327 - protein, 243 aa, Glycine max
MEDPNQAPEGSSQKKMGRGKIEIKRIENTTNRQVTFCKRRNGLLKKAYELSVLCDAEVALVVFSTRGRLYEYANNSVRATIERYKKANAAASNAESVSEANTQFYQQESSKLRRQIRDIQNLNRHILGEALGSLSLKELKNLEGRLEKGLSRVRSRKHETLFADVEFMQKREIELQNHNNYLRAKIAEHERAQQQQSNMNMSGTLCESLPSQSYDRNFFPVNLIASDDQQQYSRQDHTALQLV

SEQ ID NO: 2328 - protein, 266 aa, Thermosynechococcus elongatus BP-1
MIVPKISERFEHCRARQRCALIPFLTAGDPDLETTVAALKILDDHGADLIELGMPYSDPLADGPVIQAAATRALQRGTRLEAVLEMTTDLHQQLTAPLILFSYYNPIYHRGVSSFLKAVAQAGIKGLVIPDLPLEEAEPVLAETANLGLELTLLIAPTTSPERMRAIATASQGFIYLVSTTGVTGMRQEMASRVQELLHTLRQITPKPIGVGFGIASPEHARQVRDWGADAAIVGSAFVKRLAEPDQGLAAVAEFCQSLRTALDTP

SEQ ID NO: 2329 - protein, 535 aa, Hordeum vulgare subsp. vulgare
MEVNVKGNYVQVYVMLPLDAVSVNNRFEKGDELRAQLRKLVEAGVDGVMVDVWWGLVEGKGPKAYDWSAYKQLFELVQKAGLKLQAIMSFHQCGGNVGDAVNIPIPQWVRDVGTCDPDIFYTDGHGTRNIEYLTLGVDNQPLFHGRSAVQMYADYMTSFRENMKEFLDAGVIVDIEVGLGPAGEMRYPSYPQSHGWSFPGIGEFICYDKYLQADFKAAAAAVGHPEWEFPNDVGQYNDTPERTQFFRDNGTYLSEKGRFFLAWYSNNLIKHGDRILDEANKVFLGYKVQLAIKISGIHWWYKVPSHAAELTAGYYNLHDRDGYRTIARMLKRHRASINFTCAEMRDSEQSSQAMSAPEELVQQVLSAGWREGLNVACENALPRYDPTAYNTILRNARPHGINQSGPPEHKLFGFTYLRLSNQLVEGQNYANFKTFVDRMHANLPRDPYVDPMAPLPRSGPEISIEMILQAAQPKLQPFPFQEHTDLPVGPTGGMGGQAEGPTCGMGGQVKGPTGGMGGQAEDPTSGMGGELPATM

SEQ ID NO: 2330 - protein, 402 aa, Nitellopsis obtusa
LLGDNKVRAVAMSATDGLMRGMEVIDTGAPLSVPVGETTLGRIFNVLGEPVDNLGPVDTTTTFPIHRSAPAFTQLDTKLSIFETGIKVVDLLAPYRRGGKIGLFGGAGVGKTVLIMELINNIAKAHGGVSVFGGVGERTREGNDLYMEMKESKVINEENISESKVALVYGQMNEPPGARMRVGLTALTMAEYFRDVNKQDVLLFIDNIFRFVQAGSEVSALLGRMPSAVGYQPTLSTEMGSLQERITSTKEGSITSIQAVYVPADDLTDPAPATTFAHLDATTVLSRNLAAKGIYPAVDPLDSTSTMLQPWIVGEEHYETAQGVKETLQRYKELQDIIAILGLDELSEEDRLIVARARKIERFLSQPFFVAEVFTGSPGKYVSLIDTIKGFQMILSGELDHL

SEQ ID NO: 2331 - protein, 477 aa, Trichilia emetica
  unsure (1)..(477): unsure at all Xaa locations
LEKKKSGHIAQIIGPVLDVPFPPGKMPNIYNALVVKGRDTVGQPINVTCEVQQLLGNNRVRAVXMSATDGLTRGMEVIDTGAPLSVPVGGATLGRIFNVLGEPVDNLGPVDTRTTSPIHKPSPAFIQLDTKLSIFETGIKVVDLLAPYRRGGKIGLFGGAGVGKTVLIMELINNIAKAHGGVSVFGGVGERTREGNDLYMEMKESGVINEQNIAESKVALVYGQMNEPPGARMRVGLTALTMAEYFRDVNEQDVLLFIDNIFRFVQAGSEVSALLGRMPSAVGYQPTLSTEMGSLQERITSTKEGSITSIQAVYVPADDLTDPAPATTFAHLDATTVLSRGLAAKGIYPAVDPLDSTSTMLQPRIVGEEHYETAQRVKQTLQRYKELQDIIAILGLDELSEEDRLTVARARKIERFLSQPFFVAEVFTGSPGKYVGLAETIRGFKLILSGEFDGLPEQAFYLVGNIDEVTAKATNLE

SEQ ID NO: 2332 - protein, 479 aa, Shewanella oneidensis MR-1
MFRRTKIVTTLGPATDRDDNLRRIIAAGANVVRLNFSHGSPEDHLKRATQAREIAKELGVHVAILGDLQGPKIRVSTFKDNKKIQLKLGQTYILDAELAKGEGDENQVGIDYKQLPDDVNVGDILMLDDGRVQLRVERVEGRKVHTTVTVAGPLSNNKGINKQGGGLSAAALTEKDKADILTAAMIQVDYLAVSFPRSGADLEYARSLAQQAGSNALIVAKVERAEAVASDEAMDDVILASDVVMVARGDLGVEIGDAALVAVQKKLIARSRQLNKIVITATQMMESMISSPMPTRAEVMDVANAVLDGTDAVMLSAETAAGDFPEETVKAMANVCVGAESHPSVKVSKHRLDARFTSVEETIALSTMYAANHLEGVKAIIALTESGATPKLMSRISSSLPILGLSRHDTTLAKMALYRGVLPIYFDSTIYPADELAQKALESLTKAGYLHSGDLVLMTKGDAMETIGGTNTCKVLIVA

SEQ ID NO: 2333 - protein, 481 aa, Vicia faba var. minor
MVVEKNASNNHHQTFYVSIDQQIDSKFFDDDGRVKRTGTSWTASAHVITAVIGSGVLSLAWAIAQLGWIAGPIVMFLFAWVTYYTSVLLCECYRNGDPVNGKRNYTYMEVVHSNLGGFQVQLCGLIQYLNLVGVAIGYTVASAISMMAIVRSNCFHRSGGKDPCHMNSNIYMIAFGAVQIIFSQIPDFDQLWWLSIVAVVMSFTYSTIGLGLGIGKVIENKKFAGTITGINDVTKAQKTWGSLQALGDIAFAYSFSMILIEIQDTIKAPPPSESKTMKKATLISVIVTTFFYMLCGCFGYAAFGNSSPGNLLTGFGFYNPFWLLDIANAAIVIHLIGAYQVYCQPLFAFVENYTAKRFPDSDFVNKDVKIPIPGLDRYKLNLFRLVWRTVYVILTTLISMLLPFFNDIVGLLGAIGFWPLTVYFPVEMYIIQKKIPKWSTKWICLQLLSGACLIITIAATIGSIAGLILDLKVFKPFKTIY

SEQ ID NO: 2334 - protein, 242 aa, Escherichia coli
LKERIEGAFVPFVTLGDPGIEQSLKIIDTLIEAGADALELGIPFSDPLADGPTIQNATLRAFAAGVTPAQCFEMLALIRQKHPTIPIGLLMYANLVFNKGIDEFYAQCEKVGVDSVLVADVPVEESAPFRQAALRHNVAPIFICPPNADDDLLRQIASYGRGYTYLLSRAGVTGAENRAALPLNHLVAKLKEYNAAPPLQGFGISAPDHVKAAIDAGAAGAIFGSVIVKNIEQTINEPEKML

SEQ ID NO: 2335 - protein, 242 aa, Shigella flexneri
LKERKEGAFVPFVTLGDPGIEQSLKIIDTLIEAGADALELGIPFSDPLADGPTIQNATLRAFAAGVTPAQCFEMLALIRQKHPTIPIGLLMYANLVFNKGIDEFYAQCEKVGVDSVLVADVPVEESAPFRQAALRHNVAPIFICPPNADDDLLRQIASYGRGYTYLLSRAGVTGAENRAALPLNHLVAKLKEYNAAPPLQGFGISAPDQVKAAIDAGAAGAIFCLAIVKIIEQHINEPEKML

SEQ ID NO: 2336 - protein, 488 aa, Hedera helix
  unsure (1)..(488): unsure at all Xaa locations
GVSTLEKKNLGNITQIIGPVLDVAFPPGKMPNIYNALVVKGRDTVGQQINVTCEVQQLLGNNRVRAVAMSATDGLTRGMEVIDTGAPLSVPVGGTTLGRIFNVLGEPVDNXXXXXXXTTSPIHRSAPAFIQLDTKLSIFETGIKVVDLLAPYRRGGKIGLFGGAGVGKTVLIMELINNIAKAHGGVSVFGGVGERTREGNDLYMEMKESGVINEQNIAESKVALVYGQMNEPPGARMRVGLTALTMAEYFRDVNEQDVLLFIDNIFRFVQAGSEVSALLGRMPSAVGYQPTLSTEMGTLQERITSTKEGSITSIQAVYVPADDLTDPAPATTFAHLDATTVLSRRLAAKGIYPAVDPLDSTSTMLQPRIVGEEHYETAQRVKQTLQRYKELQDIIAILGLDELSEEDRLTVARARKIERFLSQPFFVAEVFTGSPGKYVGLAETIRGFQLILSGELDGLPEQAFYLVGNIDEATAKAMNLEMESNLKK

SEQ ID NO: 2337 - protein, 509 aa, Schizosaccharomyces pombe
MSSSAVSPKQWVAGLNSELDIPAVNRRTSIICTIGPKSNNVETLCKLRDAGMNIVRMNFSHGSYEYHQSVIDNARKASATNPLFPLAIALDTKGPEIRTGLTVGGTDYPISSGHEMIFTTDDAYAEKCNDKVMYIDYKNITKVIQPGRIIYVDDGILSFTVIEKVDDKNLKVRVNNNGKISSKKGVNLPKTDVDLPALSEKDKADLRFGVKNGVDMIFASFIRRAEDVIHIREVLGEEGKNIKIICKIENQQGVNNFDSILDVTDGIMVARGDLGIEIPASQVFVAQKMMIAKCNIAGKPVACATQMLESMTYNPRPTRAEVSDVGNAVLDGADLVMLSGETTKGSYPVEAVTYMAETARVAEASIPYGSLYQEMFGLVRRPLECATETTRVAAIGASIESDAKAIVVLSTSGNTARLCSKYRPSIPIVMVTRCPQRARQSHLNRGVYPVIYEKEPLSDWQKDVDARVAYGCQQAYKMNILKKGDKIIVLQGAVGGKGHTSIFRLTVAE
